(19) United States
(12) Patent Application Publication
(10) Pub. No.: US 2025/0297262 A1
(43) Pub. Date: Sep. 25, 2025

(54) REGULATION OF TYPE I IFN SIGNALING BY TARGETING A DECOY RECEPTOR

(71) Applicant: THE REGENTS OF THE UNIVERSITY OF COLORADO A BODY CORPORATE, Denver, CO (US)

(72) Inventors: Edward CHUONG, Boulder, CO (US); Giulia PASQUESI, Broomfield, CO (US)

(21) Appl. No.: 18/864,230

(22) PCT Filed: May 9, 2023
(86) PCT No.: PCT/US2023/066767

§ 371 Date: Nov. 8, 2024

Related U.S. Application Data
(60) Provisional application No. 63/339,572, filed on May 9, 2022.

(51) Int. Cl. C12N 15/113; A61K 48/00; C12N 9/22; C12N 15/11

(52) U.S. Cl. CPC C12N 15/1138; A61K 48/005; C12N 9/226; C12N 15/111; C12N 2310/11; C12N 2310/14; C12N 2310/20; C12N 2320/33

(57) ABSTRACT

The present invention includes systems, methods and compositions to modulate the IFN signaling pathway and its downstream effects on the innate immune response by regulating the expression of one or more IFNAR2 isoforms. In a preferred aspect, the modulation of the IFN signaling pathway may be accomplished by modulating the relative ration between IFNAR2 isoforms, IFNAR2-L and IFNAR2-S.

### CROSS REFERENCE TO RELATED APPLICATIONS

[0001] This International PCT application claims the benefit of and priority to U.S. Provisional Application No. 63/339,572, filed May 9, 2022. The specification, claims and drawings of which are incorporated herein by reference in their entirety.

### SEQUENCE LISTING

[0002] The instant application contains contents of the electronic sequence listing (90245-00791-Sequence-Listing.xml; Size: 3,259,809 bytes; and Date of Creation: May 9, 2023) is herein incorporated by reference in its entirety.

### TECHNICAL FIELD

[0003] The present invention relates to systems, methods, and compositions to regulate the type I Interferon (IFN) signaling pathway in a human subject and its downstream effects on the innate immune response.

### BACKGROUND

[0004] The IFN signaling pathway controls the innate immune response of human cells, and has been an important therapeutic target for over 30 years. Recombinant IFN is widely used in the treatment of several cancers, autoimmune disorders including multiple sclerosis, and viral infections. Dysregulation of IFN signaling is correlated with severe COVID-19 and administration of IFNs are under clinical trials for SARS-CoV2 infection. Despite the widespread importance of IFN-related therapies, unsolved challenges include off-target toxicity and acquired cellular resistance to IFN signaling. New methods are needed to enable less toxic and more effective control of cellular sensitivity to IFN signaling.

[0005] The Interferon Alpha And Beta Receptor Subunit 2 (IFNAR2) cytokine receptor (SEQ ID NO. 1) is a core component of type I IFN signaling. The human IFNAR2 genomic locus contains multiple transcript isoforms, with the canonical full-length protein encoded by the longest isoform (IFNAR2-L) (SEQ ID NO. 4, and 7). An alternative short IFNAR2-S isoform (SEQ ID NO. 2, and 6) shares the first 8 exons with IFNAR2-L but is truncated by an early terminal 9th exon, derived from a primate-specific Alu repeat insertion. The resulting transcript is predicted to produce a truncated receptor that contains intact ligand-binding and transmembrane domains, but lacks the cytoplasmic signaling domain. However, the short IFNAR2-S isoform is assumed to be nonfunctional, and the long IFNAR2-L isoform is widely assumed to be the only source of IFNAR2 protein in human cells.

[0006] In contrast to this expectation, as described below, the present inventors have demonstrated through transcriptomic analysis that IFNAR2-S is expressed at higher levels than the long IFNAR2-L isoform in most human tissues. Isoform-specific analysis and functional dissection of IFNAR2-S and IFNAR2-L was conducted which facilitated the discovery that IFNAR2-S functions as a decoy receptor that negatively regulates type I IFN signaling in human cells. Based on this new understanding, the present inventors demonstrate new strategies to modulate IFN responses by modulating expression of IFNAR2 isoforms, for example by overexpression or silencing. As described below, the modulating expression of IFNAR2 isoforms may have significant therapeutic applications.

### SUMMARY OF THE INVENTION

[0007] In one aspect, the present invention includes systems, methods and compositions to modulate the IFN signaling pathway in a human subject and its downstream effects on the innate immune response by regulating the expression of one or more IFNAR2 isoforms. In a preferred aspect, the modulation of the IFN signaling pathway may be accomplished by increasing or decreasing the expression of one or more IFNAR2 isoforms, and preferably IFNAR2-L and IFNAR2-S.

[0008] In another aspect, the present invention includes systems, methods and compositions to increase or decrease the IFN signaling pathway in a subject, and preferably a human subject though the manipulation of the relative ratio and/or expression levels or one or more IFNAR2 isoforms, and preferably IFNAR2-L and IFNAR2-S. In one preferred embodiment, the present invention may include downregulating the IFN signaling pathway in a subject through increasing the relative expression/population of IFNAR2-S, compared to IFNAR2-L. In another preferred embodiment, the present invention may include upregulating the IFN signaling pathway in a subject through increasing the relative expression/population of IFNAR2-L, compared to IFNAR2-S.

[0009] In another aspect, the present invention includes systems, methods and compositions to increase or decrease the IFN mediated innate immune response in a subject, and preferably a human subject though the manipulation of the relative ratio and/or expression levels or one or more IFNAR2 isoforms, and preferably IFNAR2-L and IFNAR2-S. In one preferred embodiment, the present invention may include downregulating the innate immune response in a subject through increasing the relative expression/population of IFNAR2-S, compared to IFNAR2-L. In another preferred embodiment, the present invention may include upregulating the innate immune response in a subject through increasing the relative expression/population of IFNAR2-L, compared to IFNAR2-S.

[0010] In another aspect, the present invention includes systems, methods and compositions to modulate the IFN signaling pathway in a human subject and its downstream effects on the innate immune response by downregulating expression of one or more IFNAR2 isoforms. In a preferred embodiment, downregulating expression of one or more IFNAR2 isoforms may include inhibiting expression through a RNA interference directed to one or more IFNAR2 isoforms, and in particular IFNAR2-L and IFNAR2-S. In another preferred aspect, downregulating expression of one or more IFNAR2 isoforms may include knocking out, for example through a directed endonuclease system, such as CRISPR/Cas9, of one or more IFNAR2 isoforms, and in particular IFNAR2-L and IFNAR2-S.

[0011] In another aspect, the present invention includes systems, methods and compositions to control cellular sensitivity to interferon signaling and its downstream effects on the innate immune response by manipulating the cellular IFNAR2 isoform ratio. In a preferred aspect, the control cellular sensitivity to interferon signaling and its downstream effects on the innate immune response by manipulating the cellular ratio between IFNAR2-L and IFNAR2-S.

[0012] In another aspect, the present invention includes systems, methods and compositions to treat cancer though the manipulation of the relative ratio and/or expression levels or one or more IFNAR2 isoforms, and preferably IFNAR2-L and IFNAR2-S. In one preferred embodiment, the present invention may include downregulating the IFN signaling pathway in a subject having an IFN resistant form of cancer through increasing the relative expression/population of IFNAR2-S, compared to IFNAR2-L. In another preferred embodiment, the present invention may include upregulating the IFN signaling pathway in a subject having an inflammatory auto-immune cancer through increasing the relative expression/population of IFNAR2-L, compared to IFNAR2-S.

[0013] In another aspect, the present invention includes systems, methods and compositions to treat infection, and preferably a viral infection, though the manipulation of the relative ratio and/or expression levels or one or more IFNAR2 isoforms, and preferably IFNAR2-L and IFNAR2-S. In another preferred embodiment, the present invention may include treatment of a viral infection by upregulating the innate immune response in a subject through increasing the relative expression/population of IFNAR2-L, compared to IFNAR2-S.

### BRIEF DESCRIPTION OF THE DRAWINGS

[0014] FIG. 1 shows a schematic comparison between the canonical IFN signaling pathway and the application of “short” isoform IFNAR2-S that acts as an IFN decoy receptor, and wherein the ratio of short/long isoform levels controls sensitivity to IFN signaling.

[0015] FIG. 2 shows a schematic diagram of a Type I interferon (IFN) response and its relationship to host cellular innate immunity response.

[0016] FIG. 3 show exemplary isoforms of IFNAR2, specifically IFNAR2-L, IFNAR2-S, and IFNAR2-sol. These three isoforms are generated by alternative splicing, and can further be designated as: 1) “Long” which describes a full length, canonical functional isoform (Jak1 binding domain); 2) “Short” which describes a C-terminal domain truncation due to SINE Alu-Jr exonization event; 3) and “sol” which describes a soluble isoform containing only the extracellular portion.

[0017] FIG. 4 shows data related to COVID-19 associated genetic variants that have been determined to be specific to the short isoform (IFNAR2-S). For sever hospitalizations, the only coding variants present in the IFNAR2-S cytoplasmic exon, with none in IFNAR2-L exons.

[0018] FIGS. 5A-B shows an outline of the methodology to determine the cellular function of IFNAR2-S short isoform. (A) in silico analysis of long and short RNAseq datasets; (B) in vivo analysis of IFNAR2-S and IFNAR2-L function in exemplary human cell lines, including CRISPR/Cas9 direct knock-out of one or more IFNAR2 isoforms, stable overexpression of one or more IFNAR2 isoforms, and siRNA-mediated knockdown of one or more IFNAR2 isoforms.

[0019] FIG. 6 shows that IFNAR2-S is the main transcribed isoform, based on isoform-specific RNA-seq analysis.

[0020] FIG. 7 shows that IFNAR2-S is the main transcribed isoform, based on isoform-specific RNA-seq analysis.

[0021] FIG. 8 show the dysregulation of IFNAR2 isoform ratio in cancer.

[0022] FIG. 9 shows dynamic changes of relative IFNAR2 isoform expression during infection.

[0023] FIG. 10 show the dynamic changes of relative IFNAR2 isoform expression during infection.

[0024] FIG. 11 show an exemplary CRISPR/Cas9 IFNAR2 editing strategy. The vignette illustrates the placement of the guides designed to generate stable HeLa mutant cell lines at the IFNAR2 locus. The double KO was generated starting from a validated IFNAR2-L clone, which was edited a second time by using the guide for the generation of IFNAR2-S KO clones. Each monoclonally expanded clone was validated by PCR and sequencing. For each KO cell line, 3 distinct clones were chosen for downstream analyses and further validated by cDNA PCR and Western Blot.

[0025] FIG. 12 show that IFNAR2-L is required for STAT phosphorylation and signaling activation.

[0026] FIG. 13 shows that IFNAR2-S knockout increases stimulation of IFN-stimulated genes.

[0027] FIG. 14 shows that IFNAR2-S knockout increases cytotoxicity in response to IFNB.

[0028] FIG. 15 shows that IFNAR2-S knockout increases cytotoxicity in response to IFNB.

[0029] FIG. 16 shows a general strategy for the stable overexpression of IFNAR2 isoforms in a PiggyBac vector to allow for stable integration into human cell lines.

[0030] FIG. 17 show the modulation of IFNAR2-L and IFNAR2-S transcript levels in overexpression cell lines in knockout backgrounds.

[0031] FIG. 18 shows that overexpression of IFNAR2-S decreases IFN signaling.

[0032] FIG. 19 shows that overexpression of IFNAR2-S decreases IFN signaling.

[0033] FIG. 20 shows general strategy for siRNA knock-down of IFNAR2-L and -S isoforms.

[0034] FIG. 21 shows that isoform-specific siRNA recapitulates CRISPR knockout.

[0035] FIG. 22 shows that isoform-specific siRNA recapitulates CRISPR knockout,

[0036] FIGS. 23A-B shows that IFN signaling can depend on relative ratio rather than raw abundance of IFNAR2 isoforms.

[0037] FIG. 24 CRISPR epitope tag HiBit tag was used to demonstrate that IFAR2-S is translated in HeLa Cells, and further that most IFNAR2 isoform antibodies are not isoform specific.

[0038] FIG. 25 shows that deletion of IFNAR2-S increase sensitivity to IFN-induced cell death.

[0039] FIG. 26 shows that reintroduction of IFNAR2-S returns cells to normal IFN sensitivity.

[0040] FIG. 27 shows that targeting IFNAR2S or IFNAR2L with siRNA shows expected effects and depends on siRNA dosage. (Left) cells were treated with 10 uM siRNA total, combining varying amounts of a negative scramble siRNA and an isoform-specific siRNA. (Right) Viability in response to IFN is measured by crystal violet staining. As expected, silencing the inhibitor IFNAR2S causes reduced viability.

[0041] FIG. 28. schematic of working model for relative IFNAR2 isoform expression as a therapeutic application.

[0042] FIG. 29. IFNAR2-S ratio affects cell proliferation and cell death. Histograms show the normalized results of a crystal violet staining assessment of cell density across HeLa cell lines. Cells were transfected with a total of 10 uM siRNA, compensating target siRNA with negative control siRNA to account for potential cytotoxic effects due increasing doses of transfected siRNA. As in previous experiments, 48 hrs post transfection, cells were treated with 10 U/ml of IFNb. Four days post IFN treatment cells subjected to crystal violet staining. For each sample, we averaged absorbance values from 3 technical replicates. Significance of changes in cell density between treated and untreated (*) cells was assessed performing a pairwise t-test. Significance of changes in expression levels between treated and untreated cells across knock down cell lines at the same target siRNA molarity is reported at the bottom of the histograms and was assessed performing a pairwise emmeans contrast test in R. Based on additional replicates of the experiment, we identified 3 uM as the candidate target siRNA concentration that leads to differential cytotoxic effects of IFN.

[0043] FIG. 30. Assessment on STAT1 phosphorylation upon IFN treatment in HeLa mutant cell lines. IFNAR2 mutant HeLa cell lines were treated for 30 min with increasing doses of IFNb before harvesting. The phosphorylation of STAT1 was quantitatively assessed by phospho-Flow Cytometry.

[0044] FIG. 31A-E. (A-C) Assessment Covid19 viral replication in the absence of IFNAR2-S. We performed CRISPR/Cas9 IFNAR2 isoform specific knock out in A549 human lung carcinoma cells. Upon KO validation, cells were transfected with a plasmid for the stable expression of ACE2. (D) Cells were then pre-treated with increasing doses of IFNb (0 to 200 pM) to calculate the half maximal inhibitory concentration (IC50) of IFNb in infected cells compared to control cells. Cells were infected with 2.9×10≡PFU/well (˜11.6 moi) of the delta variant of the SARS-COV2 virus (B.1.617.2; BEI cat #NR-55672). (D) showing protective effect in Dengue model showing a decrease in viral genome replication—a proxy for infection load—upon deletion of the decoy receptor IFNAR2-S. Viral infection was assessed by RT-qPCR for the viral genome. Viral infection was performed by the Santiago lab at CU Anschutz.

### DETAILED DESCRIPTION OF THE INVENTION

[0045] In one aspect, the present inventors have characterized a novel gene product, namely an alternative IFNAR2 isoform that acts as a decoy receptor for Type I IFN, the main antiviral signaling molecule in human cells. As described below, modulating levels of this protein isoform can module cell response to IFN. In a preferred embodiment, the alternative IFNAR2 isoform includes IFNAR2-S. As noted above, characterizing IFNAR2-S as a decoy receptor has potentially transformative implications for understanding and therapeutically manipulating IFN signaling. Decades of IFN research have assumed that all detected IFNAR2 protein is produced by the long IFNAR2-L transcript. However, as a decoy receptor, the short IFNAR2-S appears identical at the surface of the cell membrane and can bind IFNB, but does not transduce IFN signaling. The present inventors have further demonstrated a previously hidden primate-specific regulatory axis, where the ratio of short/long IFNAR2 isoforms is a primary determinant of cellular IFN sensitivity. Indeed, as described herein, the manipulation of the IFNAR2 isoform ratio can be effectively used to control cellular IFN sensitivity.

[0046] As noted above, the IFNAR2 gene (SEQ ID NO. 1) encodes one of the main receptors for the Type I IFN antiviral response. The present inventors have characterized an alternative truncated isoform of IFNAR2, namely IFNAR2-S, and discovered that it acts as a negative regulator of the full-length, canonical isoform, IFNAR2-L. Modulating this isoform by overexpression or silencing is a new strategy to modulate IFN responses and may have significant therapeutic potential.

[0047] In one embodiment, the invention may include measuring, and manipulating the ratio between short and long IFNAR2 isoforms, to control cellular sensitivity to type I IFN signaling. As described herein, the expression ratio of IFNAR2 long and short isoforms as both a novel biomarker and determinant of cellular sensitivity to IFN signaling. Therefore, measuring the IFNAR2 short/long isoform ratio from cellular RNA may enable improved prediction of cellular IFN sensitivity. It will also inform downstream manipulation of the IFNAR2 isoform ratio using genetic methods (CRISPR, siRNA, oligos) for the purposes of therapeutically modulating or restoring cellular sensitivity to IFN.

[0048] In one preferred embodiment, the invention may include systems, methods, and compositions to measure IFNAR2 isoform expression ratio from cellular RNA as a biomarker of IFN sensitivity. To measure IFNAR2 isoform ratio from cellular RNA, RT-qPCR using isoform-specific primers was performed to obtain expression levels for IFNAR2-S and IFNAR2-L isoforms. The IFNAR2 short/long levels may then be used to predict cellular sensitivity to IFN, where more abundant short isoforms predicts reduced sensitivity, and more abundant long isoform predicts increased sensitivity.

[0049] In another preferred embodiment, the invention may include systems, methods, and compositions to manipulate IFNAR2 short/long isoform levels to control cellular IFN sensitivity. To manipulate the IFNAR2 isoform ratio in human cells, isoform-specific genetic targeting is used to knock out or silence the specific exon and/or splice-sites that distinguish the long and short isoforms. Multiple methods for delivering isoform-specific gene targeting therapies may be used to control IFNAR2 isoform ratio and cellular IFN sensitivity.

[0050] For example, in one embodiment, CRISPR-mediated deletion of exons can be used to decrease or ablate isoform-specific expression levels. In this embodiment, co-delivery of Cas9 and paired guide RNAs generate genomic deletions of an exon specific to either IFNAR2-L or IFNAR2-S. In another embodiment, isoform expression may be downregulated through RNA interference.

[0051] In this embodiment, siRNA sequences complementary to long- or short-specific exons may be used to decrease expression of specific isoforms to achieve a desired ratio. Examples of siRNA (sense and antisense) sequences are provided in SEQ ID NO.'s 8-1773.

[0052] In one preferred embodiment, the siRNA (sense and antisense) sequences can be directed to short-specific exons of IFNAR2, such that they decrease expression of IFNAR2-S. Exemplary, siRNA targeting IFNAR2-S can be selected from: 1438-1773.

[0053] In another preferred embodiment, the siRNA (sense and antisense) sequences directed to long- or short-specific exons may be used to decrease expression of specific isoforms, and can be selected from:

1) Anti IFNAR2-L sense:
(SEQ ID NO: 272)
GAUGAAAGUGAUAGCGAUA
1) Anti IFNAR2-L antisense:
(SEQ ID NO: 1173)
UAUCGCUAUCACUUUCAUC
2) Anti IFNAR2-L sense:
(SEQ ID NO: 214)
AGAAGAAAGUGUGGGAUUA
2) Anti IFNAR2-L antisense:
(SEQ ID NO: 1231)
UAAUCCCACACUUUCUUCU
1) Anti IFNAR2-S sense:
(SEQ ID NO: 1635)
AAACAGUCGUCCUGCCUAA
1) Anti IFNAR2-S antisense:
(SEQ ID NO: 3635)
UUAAGGGAGACUUUAUUAC
2) Anti IFNAR2-S sense:
(SEQ ID NO: 1506)
GCUGGAAUGCAGUGGCUAU
2) Anti IFNAR2-S antisense:
(SEQ ID NO: 1705)
AUAGCCACUGCAUUCCAGC

[0054] Notably, as specifically describe herein, disclosure of a sense strand also explicitly and implicitly claims its corresponding antisense strand. Conversely, any disclosure made herein of an antisense nucleotide sequence or strand, also explicitly and implicitly claims its corresponding nucleotide sequence or strand.

[0055] In another preferred embodiment, anti-sense sequences complementary to long- or short-specific exons may be used to decrease expression of specific isoforms to achieve a desired ratio. Examples of 20 base pair (bp) and 21 bp anti-sense oligonucleotides (ASOs) sequences are provided in SEQ ID NO.'s 1774-3533.

[0056] In one preferred embodiment, the ASOs sequences can be directed to short-specific exons of IFNAR2, such that they decrease expression of IFNAR2-S. Exemplary, ASOs targeting IFNAR2-S can be selected from: 3201-3533.

[0057] In another embodiment, isoform expression may be downregulated through splice-switching oligos (SSOs) targeting short or long isoform-specific splice acceptor sites used to mediate preferential splicing to occur for either IFNAR2-L or IFNAR2-S. Exemplary SSOs directed to IFNAR2-L or IFNAR2-S are provided in SEQ ID NO.'s 3149-3171, 3502, and 3504-3634.

[0058] In one preferred embodiment, the siRNA (sense and antisense) sequences can be directed to the specific terminal exon of the short IFNAR2 isoform, such that they decrease expression of IFNAR2-S. Exemplary, SSOs targeting IFNAR2-S can be selected from: 3502, and 3504-3634.

[0059] In another embodiment, the invention include novel systems, methods and compositions to increase the antiviral response in a cell through the inhibition of IFNAR2-S. Specifically, the depletion of IFNAR2-S of a target cell resulted in the decrease in viral genome replication of both SARS-CoV-2 in human A549 cells and Dengue virus in human HeLa cells, which would be understood by those of ordinary skill in the art as a proxy for viral infection load. As shown in FIG. 31, the present inventors generated a CRISPR/Cas9 IFNAR2-S isoform specific knock out in A549 human lung carcinoma cells and HeLa human cervical cancer cells. Upon validation of the knock-out, A549 cells were transfected with a plasmid for the stable expression of a SARS-CoV-2 receptor, namely the ACE2 receptor. The present inventors then pre-treated the cells with increasing doses of IFNβ (0 to 200 pM) and calculated the half maximal inhibitory concentration (IC50) of IFNβ in infected cells compared to control cells. Similar viral challenges were conducted using Dengue (DENV) virus as another exemplary model in an IFNAR2-S knock-out in HeLa cells. Again, as shown in FIG. 31 A-E, the IFNAR2-S knockout cells showed stronger antiviral response to both SARS-CoV-2 and Dengue virus infection, specifically when pre-treated with IFN prior to infection. These data show that IFNAR2-S modulation can significantly affect the antiviral response, and specifically depletion of IFNAR2-S increases the cell's antiviral response.

[0060] As a result, in one embodiment, the invention include novel methods and compositions for increasing the anti-viral response in a cell, comprising inhibiting the expression or activity of IFNAR2-S, for example through the targeted application of an RNAi reaction configured to downregulation IFNAR2-S expression in a cell. In another preferred embodiment, the invention include novel methods and compositions for treating a viral infection in a subject in need thereof. In a preferred embodiment, the invention includes inhibiting the expression or activity of IFNAR2-S in a subject in need thereof, for example through the administration of an interfering RNA molecule targeting IFNAR2-S. In a preferred embodiment, the invention includes inhibiting the expression or activity of IFNAR2-S in a subject in need thereof, for example through the administration of a pharmaceutical composition containing at least one interfering RNA molecule targeting IFNAR2-S, and a pharmaceutically acceptable carrier. In one embodiment, the RNA interfering molecule many be selected from SEQ ID NO.'s 1-3635. In a preferred embodiment, the RNA interfering molecule and can be selected from:

1) Anti IFNAR2-S sense:
(SEQ ID NO: 1635)
AAACAGUCGUCCUGCCUAA
1) Anti IFNAR2-S antisense:
(SEQ ID NO: 3635)
UUAAGGGAGACUUUAUUAC
2) Anti IFNAR2-S sense:
(SEQ ID NO: 1506)
GCUGGAAUGCAGUGGCUAU
2) Anti IFNAR2-S antisense:
(SEQ ID NO: 1705)
AUAGCCACUGCAUUCCAGC

[0061] In another embodiment, the activity of INF in a call can be increased, and specifically the cytotoxic activity of INF in response to the ratio of IFNAR2-S and IFNAR2-L in a target cell. For example as show in FIG. 29, the present inventors transfected HeLa cells with increasing doses of isoform-specific siRNA up to 10 uM concentration selected from:

1) Anti IFNAR2-S sense:
(SEQ ID NO: 1635)
AAACAGUCGUCCUGCCUAA
1) Anti IFNAR2-S antisense:
(SEQ ID NO: 3635)
UUAAGGGAGACUUUAUUAC
2) Anti IFNAR2-S sense:
(SEQ ID NO: 1506)
GCUGGAAUGCAGUGGCUAU
2) Anti IFNAR2-S antisense:
(SEQ ID NO: 1705)
AUAGCCACUGCAUUCCAGC

[0062] As shown, 48 hrs post transfection, cells were treated with 10 U/ml of IFNb. Four days post IFN treatment cell viability was measured through crystal violet staining. For each sample, the inventors averaged crystal violet absorbance values from 3 technical replicates. Again, as shown in FIG. 29, the inhibition of IFNAR2-S or of IFNAR2-L had opposing effects on proliferation and cell death. The present inventors demonstrated that approximately a 3 uM concentration of the candidate target siRNA is sufficient to lead to differential cytotoxic effects of IFN. In another embodiment, a RNA interfering molecule can be contacted with a cell to inhibit IFNAR2-S, thereby increasing the relative abundance of IFNAR2-L, wherein the RNA and can be selected from: SEQ ID NO.'s 1-3635.

[0063] In another embodiment, the inhibition of IFNAR2-S, can cause an increase in INF signaling in a cell. As shown in FIG. 30, the present inventors generated a IFNAR2-S knock-out cell line which was treated with increasing doses of IFNb. The cells were harvested and phosphorylation of STAT1 was quantitatively assessed by phospho-Flow Cytometry. Again, as shown in FIG. 30, the IFNAR2-S KO cells reach cytokine saturation at ˜100 U/ml of IFNb. Notably, higher doses of IFNb are required to reach signal saturation in the presence of the decoy receptor IFNAR2-S in wild-type cells, while reintroduction of IFNAR2-S in IFNAR2-S knock-out cells lowers cell responsiveness to IFNb. These data confirm that IFNAR2-L is required for type I IFN signaling, and that inhibition of the IFNAR2-S decoy isoform increase the sensitivity to INF in the cell.

[0064] The terms “antisense oligomer” and “ASO” and “antisense oligonucleotide” are used interchangeably and refer to a sequence of cyclic nucleotides, each bearing a base-pairing moiety, linked by internucleotide linkages that allow the base-pairing moieties to hybridize to a target sequence in a nucleic acid (typically an RNA) by Watson-Crick base pairing, to form a nucleic acid:oligomer heteroduplex within the target sequence. The cyclic subunits are based on ribose or another pentose sugar or, in alternative embodiments, a thiomorpholino group. The oligomer may have exact or near sequence complementarity to the target sequence; variations in sequence near the termini of an oligomer are generally preferable to variations in the interior. In these methods, the antisense oligomer can be designed to block or inhibit translation of mRNA or to inhibit natural pre-mRNA splice processing and may be said to be “directed to” or “targeted against” a target sequence with which it hybridizes. It will be obvious to one skilled in the art that additional oligomer chemistries can be used to practice the invention including phosphorodiamidate-linked morpholino oligomers (PMO) or locked nucleic acid (LNA) oligomers.

[0065] Also included are vector delivery systems that are capable of expressing the oligomeric sequences of the present invention, such as vectors that express a polynucleotide sequence comprising any one or more of the sequences shown in SEQ ID NO.'s 1-3634, and variants thereof, as described herein.

[0066] The terms “vector” or “nucleic acid construct” as used herein means a polynucleotide molecule, preferably a DNA molecule derived, for example, from a plasmid, bacteriophage, yeast or virus, into which a polynucleotide can be inserted or cloned. A vector preferably contains one or more unique restriction sites and can be capable of autonomous replication in a defined host cell including a target cell or tissue or a progenitor cell or tissue thereof or be integrated with the genome of the defined host such that the cloned sequence is reproducible. Accordingly, the vector can be an autonomously replicating vector, i.e., a vector that exists as an extra-chromosomal entity, the replication of which is independent of chromosomal replication, e.g., a linear or closed circular plasmid, an extra-chromosomal element, a mini-chromosome, or an artificial chromosome. The vector can contain any means for assuring self-replication. Alternatively, the vector can be one which, when introduced into the host cell, is integrated into the genome and replicated together with the chromosome(s) into which it has been integrated.

[0067] A “pharmaceutical composition” or “pharmaceutical composition of the invention” refers to a compound of the invention or a pharmaceutically acceptable salt, solvate, hydrate or prodrug thereof as an active ingredient, and at least one pharmaceutically acceptable carrier or excipient. In some embodiments, the pharmaceutical composition comprises two or more pharmaceutically acceptable carriers and/or excipients. In other embodiments, the pharmaceutical composition further comprises at least one additional antibiotic, such as through a co-treatment. As used herein, a “pharmaceutically acceptable carrier” refers to a carrier or diluent that does not cause significant irritation to an organism and does not abrogate the biological activity and properties of the administered composition of the invention. The pharmaceutical acceptable carrier may comprise any conventional pharmaceutical carrier or excipient. The choice of carrier and/or excipient will to a large extent depend on factors such as the particular mode of administration, the effect of the carrier or excipient on solubility and stability, and the nature of the dosage form.

[0068] The term “pharmaceutically acceptable carrier” as used herein further pertains to compounds, materials, compositions, and/or dosage forms which are, within the scope of sound medical judgement, suitable for use in contact with the tissues of a subject (e.g., human) without excessive toxicity, irritation, allergic response, or other problem or complication, commensurate with a reasonable benefit/risk ratio. Each carrier, excipient, etc. must also be “acceptable” in the sense of being compatible with the other ingredients of the formulation. Suitable carriers, diluents, excipients, etc. can be found in standard pharmaceutical texts. See, for example, “Handbook of Pharmaceutical Additives,” 2nd Edition (eds. M. Ash and I. Ash), 2001 (Synapse Information Resources, Inc., Endicott, N.Y., USA), “Remington's Pharmaceutical Sciences”, 20th edition, pub. Lippincott, Williams & Wilkins, 2000; and “Handbook of Pharmaceutical Excipients”, 2nd edition, 1994.

[0069] Suitable pharmaceutically acceptable carriers include inert diluents or fillers, water, and various organic solvents (such as hydrates and solvates). The pharmaceutical compositions may, if desired, contain additional ingredients such as flavorings, binders, excipients, and the like. Thus, for oral administration, tablets containing various excipients, such as citric acid may be employed together with various disintegrants such as starch, alginic acid and certain complex silicates and with binding agents such as sucrose, gelatin, and acacia. Examples, without limitation, of excipients include calcium carbonate, calcium phosphate, various sugars and types of starch, cellulose derivatives, gelatin, vegetable oils and polyethylene glycols. Additionally, lubricating agents such as magnesium stearate, sodium lauryl sulfate and talc are often useful for tableting purposes. Solid compositions of a similar type may also be employed in soft and hard filled gelatin capsules. Non-limiting examples of materials, therefore, include lactose or milk sugar and high molecular weight polyethylene glycols. When aqueous suspensions or elixirs are desired for oral administration the active compound therein may be combined with various sweetening or flavoring agents, coloring matters or dyes and, if desired, emulsifying agents or suspending agents, together with diluents such as water, ethanol, propylene glycol, glycerin, or combinations thereof.

[0070] The pharmaceutical composition of the invention may, for example, be in a form suitable for oral administration as a tablet, capsule, pill, powder, sustained release formulations, solution suspension, for parenteral injection as a sterile solution, suspension, or emulsion, for topical administration as an ointment or cream or for rectal administration as a suppository. The pharmaceutical composition may be in unit dosage forms suitable for single administration of precise dosages. Exemplary parenteral administration forms include solutions or suspensions of active compounds in sterile aqueous solutions, for example, aqueous propylene glycol or dextrose solutions. Such dosage forms may be suitably buffered, if desired.

[0071] A pharmaceutical composition of the invention may be administered as single or multiple agents, for example a pharmaceutical composition of a the compound of the invention, or a pharmaceutical composition of the compound of the invention and a second therapeutic compound or agent. In some embodiments, the methods the pharmaceutical composition of the invention can be used to treat a mitochondrial disease, or one or more of its symptoms. Pharmaceutical compositions suitable for the delivery of the compound of the invention as described herein, and methods for their preparation will be readily apparent to those skilled in the art. Such compositions and methods for their preparation can be found, for example, in ‘Remington's Pharmaceutical Sciences’, 19th Edition (Mack Publishing Company, 1995), the disclosure of which is incorporated herein by reference in its entirety.

[0072] “Treatment” of an individual (e.g. a mammal, such as a human) or a cell is any type of intervention used in an attempt to alter the natural course of the individual or cell. Treatment includes, but is not limited to, administration of a pharmaceutical composition, and may be performed either prophylactically or subsequent to the initiation of a pathologic event or contact with an etiologic agent. Treatment includes any desirable effect on the symptoms or pathology of a disease or condition associated with the IFN signaling pathway, such as cancer, or a viral infection, and may include, for example, minimal changes or improvements in one or more measurable markers of the disease or condition being treated. Also included are “prophylactic” treatments, which can be directed to reducing the rate of progression of the disease or condition being treated, delaying the onset of that disease or condition, or reducing the severity of its onset. “Treatment” or “prophylaxis” does not necessarily indicate complete eradication, cure, or prevention of the disease or condition, or associated symptoms thereof.

[0073] Treatment with an antisense oligonucleotides of the invention may modulate the relative expression levels of cellular IFNAR2-L or IFNAR2-S in a subject to be treated. In a preferred embodiment, this expression of IFNAR2-S in inhibited, while in alternative embodiments expression of IFNAR2-L is inhibited. In alternative embodiment, expression of IFNAR2-S in upregulated, for example by overexpression, while in alternative embodiments, expression of IFNAR2-L in upregulated, for example by overexpression. In other embodiments, expression of IFNAR2-S in upregulated, while expression of IFNAR2-L in downregulated, and vice versa.

[0074] Treatment with an antisense oligonucleotides of the invention may modulate the relative ratio of cellular IFNAR2-L or IFNAR2-S in a subject to be treated. In a preferred embodiment, this ratio may be modulated such that there more IFNAR2-L than IFNAR2-S present in the cell. In another preferred embodiment, this ratio may be modulated such that there is less IFNAR2-L than IFNAR2-S present in the cell. In further preferred embodiments, this ratio may be modulated such that there is approximately the same amount of IFNAR2-L as IFNAR2-S present in the cell.

[0075] Treatment may be effectuated by a therapeutically effective amount of one or more oligonucleotide of the invention An “effective amount” or “therapeutically effective amount” refers to an amount of therapeutic compound, such as an antisense oligonucleotide, administered to a human subject, either as a single dose or as part of a series of doses, which is effective to produce a desired therapeutic effect. For an antisense oligonucleotide, this effect is typically brought about by inhibiting translation or natural splice-processing of a selected target sequence. An effective amount may be variable such as 5 mg/kg of a composition comprising a thiomorpholino antisense oligonucleotide for a period of time to treat the subject. In one embodiment, an effective amount might be 5 mg/kg of a composition comprising an oligonucleotide, such as an siRNA, ASO or SSO, to modulate the relative ratio of IFNAR2-L and IFNAR2-S present in the cell.

[0076] When the oligonucleotides of this invention are administered as pharmaceutical compositions, to humans and animals, they can be given per se or as a pharmaceutical composition containing, for example, 0.1 to 99% (more preferably, 10 to 30%) of active ingredient in combination with a pharmaceutically acceptable carrier. As noted above, the formulations or preparations of this disclosure may be given orally, parenterally, systemically, topically, or intramuscular administration. They are typically given in forms suitable for each administration route. For example, they are administered in tablets or capsule form, by injection, inhalation, eye lotion, ointment, suppository, etc. administration by injection, infusion or inhalation; topical by lotion or ointment.

[0077] The phrases “parenteral administration” and “administered parenterally” as used herein means modes of administration other than enteral and topical administration, usually by injection, and includes, without limitation, intravenous, intramuscular, intraarterial, intrathecal, intracapsular, intraorbital, intracardiac, intradermal, intraperitoneal, transtracheal, subcutaneous, subcuticular, intraarticular, subcapsular, subarachnoid, intraspinal and intrasternal injection and infusion.

[0078] The phrases “systemic administration,” “administered systemically,” “peripheral administration” and “administered peripherally” as used herein mean the administration of a compound, drug or other material other than directly into the central nervous system, such that it enters the patient's system and, thus, is subject to metabolism and other like processes, for example, subcutaneous administration.

[0079] Regardless of the route of administration selected, the oligomers of the present invention, which may be used in a suitable hydrated form, and/or the pharmaceutical compositions of the present invention, may be formulated into pharmaceutically-acceptable dosage forms by conventional methods known to those of skill in the art. Actual dosage levels of the active ingredients in the pharmaceutical compositions of this invention may be varied so as to obtain an amount of the active ingredient which is effective to achieve the desired therapeutic response for a particular patient, composition, and mode of administration, without being unacceptably toxic to the patient.

[0080] The selected dosage level will depend upon a variety of factors including the activity of the particular oligomer of this disclosure employed, or the ester, salt or amide thereof, the route of administration, the time of administration, the rate of excretion or metabolism of the particular oligomer being employed, the rate and extent of absorption, the duration of the treatment, other drugs, compounds and/or materials used in combination with the particular oligomer employed, the age, sex, weight, condition, general health and prior medical history of the patient being treated, and like factors well known in the medical arts.

[0081] A physician or veterinarian having ordinary skill in the art can readily determine and prescribe the effective amount of the pharmaceutical composition required. For example, the physician or veterinarian could start doses of the compounds of the invention employed in the pharmaceutical composition at levels lower than that required to achieve the desired therapeutic effect and gradually increase the dosage until the desired effect is achieved. In general, a suitable daily dose of a compound of the invention will be that amount of the compound which is the lowest dose effective to produce a therapeutic effect. Such an effective dose will generally depend upon the factors described above. Generally, oral, intravenous, intracerebroventricular, intramuscular and subcutaneous doses of the compounds of this invention for a patient, when used for the indicated effects, will range from about 0.0001 to about 100 mg per kilogram of body weight per day.

[0082] Preferred doses of the oligonucleotides of the invention are administered generally from about 5-100 mg/kg. In some cases, doses of greater than 100 mg/kg may be necessary. For i.v. administration, preferred doses are from about 0.1 mg to 100 mg/kg. In some embodiments, the thiomorpholino oligomers are administered at doses of about 2 mg/kg, to about 100 mg/kg, including all integers in between.

[0083] If desired, the effective daily dose of the active compound may be administered as two, three, four, five, six or more sub-doses administered separately at appropriate intervals throughout the day, optionally, in unit dosage forms. In certain situations, dosing is one administration per day. The dosing frequency is one or more administration per every 2, 3, 4, 5, 6, 7, 8, 9, 10, 11, 12, 13, 14 days, or every 1, 2, 3, 4, 5, 6, 7, 8, 9, 10, 11, 12 weeks, or every 1, 2, 3, 4, 5, 6, 7, 8, 9, 10, 11, 12 months, as needed, to maintain the desired expression levels of IFNAR2-L and IFNAR2-S in the subject.

[0084] In some embodiments, the oligonucleotides of the invention are administered, generally at regular intervals (e.g., daily, weekly, biweekly, monthly, bimonthly). The oligomers may be administered at regular intervals, e.g., daily; once every two days; once every three days; once every 3 to 7 days; once every 3 to 10 days; once every 7 to 10 days; once every week; once every two weeks; once monthly. For example, the oligomers may be administered once weekly by intravenous infusion. The oligomers may be administered intermittently over a longer period, e.g., for several weeks, months or years. For example, the oligomers may be administered once every: one, two, three, four, five, six, seven, eight, nine, ten, eleven or twelve months. In addition, the oligomers may be administered once every: one, two, three, four or five years. Administration may be followed by, or concurrent with, administration of an antibiotic, steroid or other therapeutic agent. The treatment regimen may be adjusted (dose, frequency, route, etc.) as indicated, based on the results of immunoassays, other biochemical tests and physiological examination of the subject under treatment.

[0085] Nucleic acid molecules can be administered to cells by a variety of methods known to those familiar to the art, including, but not restricted to, encapsulation in liposomes or lipoplexes, by iontophoresis, or by incorporation into other vehicles, such as hydrogels, cyclodextrins, biodegradable nanocapsules, and bioadhesive microspheres, as described herein and known in the art. In certain embodiments, microemulsification technology may be utilized to improve bioavailability of lipophilic (water insoluble) pharmaceutical agents. Among other benefits, microemulsification provides enhanced bioavailability by preferentially directing absorption to the lymphatic system instead of the circulatory system, which thereby bypasses the liver, and prevents destruction of the compounds in the hepatobiliary circulation.

[0086] While all suitable amphiphilic carriers are contemplated, the presently preferred carriers are generally those that have Generally-Recognized-as-Safe (GRAS) status, and that can both solubilize the compound of this disclosure and microemulsify it at a later stage when the solution comes into a contact with a complex water phase (such as one found in human gastro-intestinal tract). Usually, amphiphilic ingredients that satisfy these requirements have HLB (hydrophilic to lipophilic balance) values of 2-20, and their structures contain straight chain aliphatic radicals in the range of C-6 to C-20. Examples are polyethylene-glycolized fatty glycerides and polyethylene glycols.

[0087] Examples of amphiphilic carriers include saturated and monounsaturated polyethylene-glycolyzed fatty acid glycerides, such as those obtained from fully or partially hydrogenated various vegetable oils. Such oils may advantageously consist of tri-, di-, and mono-fatty acid glycerides and di- and mono-polyethyleneglycol esters of the corresponding fatty acids, with a particularly preferred fatty acid composition including capric acid 4-10, capric acid 3-9, lauric acid 40-50, myristic acid 14-24, palmitic acid 4-14 and stearic acid 5-15%. Another useful class of amphiphilic carriers includes partially esterified sorbitan and/or sorbitol, with saturated or monounsaturated fatty acids (SPAN-series) or corresponding ethoxylated analogs (TWEEN-series).

[0088] The delivery may occur by use of liposomes, lipoplexes, nanocapsules, microparticles, microspheres, lipid particles, vesicles, and the like, for the introduction of the compositions of this disclosure into suitable host cells. In particular, the compositions of this disclosure may be formulated for delivery either encapsulated in a lipid particle, a liposome, a lipoplex, a vesicle, a nanosphere, a nanoparticle, or the like. The formulation and use of such delivery vehicles can be carried out using known and conventional techniques.

[0089] Hydrophilic polymers which may be suitable for use in this disclosure include polyvinylpyrrolidone, polymethoxazoline, polyethyloxazoline, polyhydroxypropyl methacrylamide, polymethacrylamide, polydimethylacrylamide, and derivatized celluloses such as hydroxymethylcellulose or hydroxyethylcellulose.

[0090] A formulation of this disclosure may comprise a biocompatible polymer selected from the group consisting of polyamides, polycarbonates, polyalkylenes, polymers of acrylic and methacrylic esters, polyvinyl polymers, polyglycolides, polysiloxanes, polyurethanes and copolymers thereof, celluloses, polypropylene, polyethylenes, polystyrene, polymers of lactic acid and glycolic acid, polyanhydrides, poly(ortho)esters, poly(butic acid), poly(valeric acid), poly(lactide-co-caprolactone), polysaccharides, proteins, polyhyaluronic acids, polycyanoacrylates, and blends, mixtures, or copolymers thereof.

[0091] Cyclodextrins are cyclic oligosaccharides, consisting of 6, 7 or 8 glucose units, designated by the Greek letters alpha, beta, or gamma, respectively. The glucose units are linked by alpha-1,4-glucosidic bonds. As a consequence of the chair conformation of the sugar units, all secondary hydroxyl groups (at C-2, C-3) are located on one side of the ring, while all the primary hydroxyl groups at C-6 are situated on the other side. As a result, the external faces are hydrophilic, making the cyclodextrins water-soluble. In contrast, the cavities of the cyclodextrins are hydrophobic, since they are lined by the hydrogen of atoms C-3 and C-5, and by ether-like oxygens. These matrices allow complexation with a variety of relatively hydrophobic compounds. The complexation takes place by Van der Waals interactions and by hydrogen bond formation. The physico-chemical properties of the cyclodextrin derivatives depend strongly on the kind and the degree of substitution. For example, their solubility in water ranges from insoluble (e.g., triacetyl-beta-cyclodextrin) to 147% soluble (w/v) (G-2-beta-cyclodextrin). In addition, they are soluble in many organic solvents. The properties of the cyclodextrins enable the control over solubility of various formulation components by increasing or decreasing their solubility.

[0092] Liposomes consist of at least one lipid bilayer membrane enclosing an aqueous internal compartment. Liposomes may be characterized by membrane type and by size. Small unilamellar vesicles (SUVs) have a single membrane and typically range between 0.02 and 0.05 micrometers in diameter; large unilamellar vesicles (LUVS) are typically larger than 0.05 micrometers Oligolamellar large vesicles and multilamellar vesicles have multiple, usually concentric, membrane layers and are typically larger than 0.1 micrometers. Liposomes with several nonconcentric membranes, i.e., several smaller vesicles contained within a larger vesicle, are termed multivesicular vesicles. Thus, formulations comprising liposomes containing a thiomorpholino oligomer of this disclosure, where the liposome membrane is formulated to provide a liposome with increased carrying capacity. Alternatively, or additionally, the compound of this disclosure may be contained within, or adsorbed onto, the liposome bilayer of the liposome. An oligomer of this disclosure may be aggregated with a lipid surfactant and carried within the liposome's internal space; in these cases, the liposome membrane is formulated to resist the disruptive effects of the active agent-surfactant aggregate. The lipid bilayer of these liposomes may contain lipids derivatized with a saccharide, including a disaccharide such as lactose, a polyethylene glycol (PEG), such that the PEG chains extend from the inner surface of the lipid bilayer into the interior space encapsulated by the liposome, and extend from the exterior of the lipid bilayer into the surrounding environment.

[0093] Active agents contained within liposomes of this disclosure are in solubilized form. Aggregates of surfactant and active agent (such as emulsions or micelles containing the active agent of interest) may be entrapped within the interior space of liposomes according to the present invention. A surfactant acts to disperse and solubilize the active agent, and may be selected from any suitable aliphatic, cycloaliphatic or aromatic surfactant, including but not limited to biocompatible lysophosphatidylcholines (LPGs) of varying chain lengths (for example, from about C14 to about C20). Polymer-derivatized lipids such as PEG-lipids may also be utilized for micelle formation as they will act to inhibit micelle/membrane fusion, and as the addition of a polymer to surfactant molecules decreases the CMC of the surfactant and aids in micelle formation. Preferred are surfactants with CMOs in the micromolar range; higher CMC surfactants may be utilized to prepare micelles entrapped within liposomes of the present invention.

[0094] Liposomes according to this disclosure may be prepared by any of a variety of techniques that are known in the art. See, e.g., U.S. Pat. No. 4,235,871; Published PCT applications WO 96/14057; New RRC, Liposomes: A practical approach, TRL Press, Oxford (1990), pages 33-104; Lasic D D, Liposomes from physics to applications, Elsevier Science Publishers BV, Amsterdam, 1993. For example, liposomes of this disclosure may be prepared by diffusing a lipid derivatized with a hydrophilic polymer into preformed liposomes, such as by exposing preformed liposomes to micelles composed of lipid-grafted polymers, at lipid concentrations corresponding to the final mole percent of derivatized lipid which is desired in the liposome. Liposomes containing a hydrophilic polymer can also be formed by homogenization, lipid-field hydration, or extrusion techniques, as are known in the art.

[0095] In another exemplary formulation procedure, the active agent is first dispersed by sonication in a lysophosphatidylcholine or other low CMC surfactant (including polymer grafted lipids) that readily solubilizes hydrophobic molecules. The resulting micellar suspension of active agent is then used to rehydrate a dried lipid sample that contains a suitable mole percent of polymer-grafted lipid, or cholesterol. The lipid and active agent suspension is then formed into liposomes using extrusion techniques as are known in the art, and the resulting liposomes separated from the unencapsulated solution by standard column separation.

[0096] In one aspect of the present invention, the liposomes are prepared to have substantially homogeneous sizes in a selected size range. One effective sizing method involves extruding an aqueous suspension of the liposomes through a series of polycarbonate membranes having a selected uniform pore size; the pore size of the membrane will correspond roughly with the largest sizes of liposomes produced by extrusion through that membrane. See e.g., U.S. Pat. No. 4,737,323 (Apr. 12, 1988). In certain embodiments, reagents such as DharmaFECT™ and Lipofectamine™ may be utilized to introduce polynucleotides or proteins into cells.

[0097] The release characteristics of a formulation of this disclosure depend on the encapsulating material, the concentration of encapsulated drug, and the presence of release modifiers. For example, release can be manipulated to be pH dependent, for example, using a pH sensitive coating that releases only at a low pH, as in the stomach, or a higher pH, as in the intestine. An enteric coating can be used to prevent release from occurring until after passage through the stomach. Multiple coatings or mixtures of cyanamide encapsulated in different materials can be used to obtain an initial release in the stomach, followed by later release in the intestine. Release can also be manipulated by inclusion of salts or pore forming agents, which can increase water uptake or release of drug by diffusion from the capsule. Excipients which modify the solubility of the drug can also be used to control the release rate. Agents which enhance degradation of the matrix or release from the matrix can also be incorporated. They can be added to the drug, added as a separate phase (i.e., as particulates), or can be co-dissolved in the polymer phase depending on the compound. In most cases the amount should be between 0.1 and thirty percent (w/w polymer). Types of degradation enhancers include inorganic salts such as ammonium sulfate and ammonium chloride, organic acids such as citric acid, benzoic acid, and ascorbic acid, inorganic bases such as sodium carbonate, potassium carbonate, calcium carbonate, zinc carbonate, and zinc hydroxide, and organic bases such as protamine sulfate, spermine, choline, ethanolamine, diethanolamine, and triethanolamine and surfactants such as Tween™ and Pluronic™. Pore forming agents which add microstructure to the matrices (i.e., water soluble compounds such as inorganic salts and sugars) are added as particulates. The range is typically between one and thirty percent (w/w polymer).

[0098] Uptake can also be manipulated by altering residence time of the particles in the gut. This can be achieved, for example, by coating the particle with, or selecting as the encapsulating material, a mucosal adhesive polymer. Examples include most polymers with free carboxyl groups, such as chitosan, celluloses, and especially polyacrylates (as used herein, polyacrylates refers to polymers including acrylate groups and modified acrylate groups such as cyanoacrylates and methacrylates).

[0099] In addition to the methods provided herein, the oligomers for use according to the invention may be formulated for administration in any convenient way for use in human or veterinary medicine, by analogy with other pharmaceuticals. The oligomers of the invention and their corresponding formulations may be administered alone or in combination with other therapeutic strategies in the treatment of a disease or condition that would be responsive to reduced or increased sensitivity to IFN, mediated by the relative cellular expression levels of IFNAR2-L or IFNAR2-S in a subject in need thereof.

[0100] Unless otherwise defined, all terms of art, notations and other scientific terminology used herein are intended to have the meanings commonly understood by those of skill in the art to which this invention pertains. In some cases, terms with commonly understood meanings are defined herein for clarity and/or for ready reference, and the inclusion of such definitions herein should not necessarily be construed to represent a substantial difference over what is generally understood in the art. The techniques and procedures described or referenced herein are generally well understood and commonly employed using conventional methodology by those skilled in the art, such as, for example, the widely utilized molecular cloning methodologies described in Sambrook et al., Molecular Cloning: A Laboratory Manual Cold Spring Harbor Laboratory Press, Cold Spring Harbor, N.Y. and Current Protocols in Molecular Biology (Ausbel et al., eds., John Wiley & Sons, Inc., As appropriate, procedures involving the use of commercially available kits and reagents are generally carried out in accordance with manufacturer defined protocols and/or parameters unless otherwise noted.

[0101] The terms “polypeptide,” “peptide” and “protein” are used interchangeably herein to refer to a polymer of amino acid residues. The terms apply to amino acid polymers in which one or more amino acid residue is an artificial chemical mimetic of a corresponding naturally occurring amino acid, as well as to naturally occurring amino acid polymers and non-naturally occurring amino acid polymer. The term “amino acid” refers to naturally occurring and synthetic amino acids, as well as amino acid analogs and amino acid mimetics that function in a manner similar to the naturally occurring amino acids. Naturally occurring amino acids are those encoded by the genetic code, as well as those amino acids that are later modified, e.g., hydroxyproline, γ-carboxyglutamate, and O-phosphoserine. Amino acid analogs refers to compounds that have the same basic chemical structure as a naturally occurring amino acid, i.e., an α carbon that is bound to a hydrogen, a carboxyl group, an amino group, and an R group, e.g., homoserine, norleucine, methionine sulfoxide, methionine methyl sulfonium. Such analogs have modified R groups (e.g., norleucine) or modified peptide backbones, but retain the same basic chemical structure as a naturally occurring amino acid. Amino acid mimetics refers to chemical compounds that have a structure that is different from the general chemical structure of an amino acid, but that functions in a manner similar to a naturally occurring amino acid. Amino acids may be referred to herein by either their commonly known three letter symbols or by the one-letter symbols recommended by the IUPAC-IUB Biochemical Nomenclature Commission. Nucleotides, likewise, may be referred to by their commonly accepted single-letter codes.

[0102] The term “expression,” as used herein, or “expression of a coding sequence” (for example, a gene or a transgene) refer to the process by which the coded information of a nucleic acid transcriptional unit (including, e.g., genomic DNA or cDNA) is converted into an operational, non-operational, or structural part of a cell, often including the synthesis of a protein. Gene expression can be influenced by external signals; for example, exposure of a cell, tissue, or organism to an agent that increases or decreases gene expression. Expression of a gene can also be regulated anywhere in the pathway from DNA to RNA to protein. Regulation of gene expression occurs, for example, through controls acting on transcription, translation, RNA transport and processing, degradation of intermediary molecules such as mRNA, or through activation, inactivation, compartmentalization, or degradation of specific protein molecules after they have been made, or by combinations thereof. Gene expression can be measured at the RNA level or the protein level by any method known in the art, including, without limitation, Northern blot, RT-PCR, Western blot, or in vitro, in situ, or in vivo protein activity assay(s).

[0103] The term “nucleic acid” or “nucleic acid molecules” include single- and double-stranded forms of DNA; single-stranded forms of RNA; and double-stranded forms of RNA (dsRNA). The term “nucleotide sequence” or “nucleic acid sequence” refers to both the sense and antisense strands of a nucleic acid as either individual single strands or in the duplex. The term “ribonucleic acid” (RNA) is inclusive of iRNA (inhibitory RNA), dsRNA (double stranded RNA), siRNA (small interfering RNA), mRNA (messenger RNA), miRNA (micro-RNA), hpRNA (hairpin RNA), tRNA (transfer RNA), whether charged or discharged with a corresponding acetylated amino acid), and cRNA (complementary RNA). The term “deoxyribonucleic acid” (DNA) is inclusive of cDNA, genomic DNA, and DNA-RNA hybrids. The terms “nucleic acid segment” and “nucleotide sequence segment,” or more generally “segment,” will be understood by those in the art as a functional term that includes both genomic sequences, ribosomal RNA sequences, transfer RNA sequences, messenger RNA sequences, operon sequences, and smaller engineered nucleotide sequences that encoded or may be adapted to encode, peptides, polypeptides, or proteins.

[0104] The term “gene” or “sequence” refers to a coding region operably joined to appropriate regulatory sequences capable of regulating the expression of the gene product (e.g., a polypeptide or a functional RNA) in some manner. A gene includes untranslated regulatory regions of DNA (e.g., promoters, enhancers, repressors, etc.) preceding (up-stream) and following (down-stream) the coding region (open reading frame, ORF) as well as, where applicable, intervening sequences (i.e., introns) between individual coding regions (i.e., exons). The term “structural gene” as used herein is intended to mean a DNA sequence that is transcribed into mRNA which is then translated into a sequence of amino acids characteristic of a specific polypeptide. It should be noted that any reference to a SEQ ID, or sequence specifically encompasses that sequence, as well as all corresponding sequences that correspond to that first sequence. For example, for any amino acid sequence identified, the specific specifically includes all compatible nucleotide (DNA and RNA) sequences that give rise to that amino acid sequence or protein, and vice versa.

[0105] A nucleic acid molecule may include either or both naturally occurring and modified nucleotides linked together by naturally occurring and/or non-naturally occurring nucleotide linkages. Nucleic acid molecules may be modified chemically or biochemically, or may contain non-natural or derivatized nucleotide bases, as will be readily appreciated by those of skill in the art. Such modifications include, for example, labels, methylation, substitution of one or more of the naturally occurring nucleotides with an analog, internucleotide modifications (e.g., uncharged linkages: for example, methyl phosphonates, phosphotriesters, phosphoramidates, carbamates, etc.; charged linkages: for example, phosphorothioates, phosphorodithioates, etc.; pendent moieties: for example, peptides; intercalators: for example, acridine, psoralen, etc.; chelators; alkylators; and modified linkages: for example, alpha anomeric nucleic acids, etc.). The term “nucleic acid molecule” also includes any topological conformation, including single-stranded, double-stranded, partially duplexed, triplexed, hair-pinned, circular, and padlocked conformations.

[0106] A polynucleotide sequence is operably linked to an expression control sequence(s) (e.g., a promoter and, optionally, an enhancer) when the expression control sequence controls and regulates the transcription and/or translation of that polynucleotide sequence. Unless otherwise indicated, a particular nucleic acid sequence also implicitly encompasses conservatively modified variants thereof (e.g., degenerate codon substitutions), the complementary (or complement) sequence, and the reverse complement sequence, as well as the sequence explicitly indicated. Specifically, degenerate codon substitutions may be achieved by generating sequences in which the third position of one or more selected (or all) codons is substituted with mixed-base and/or deoxyinosine residues (see e.g., Batzer et al., Nucleic Acid Res. 19:5081 (1991); Ohtsuka et al., J. Biol. Chem. 260:2605-2608 (1985); and Rossolini et al., Mol. Cell. Probes 8:91-98 (1994)). Because of the degeneracy of nucleic acid codons, one can use various different polynucleotides to encode identical polypeptides.

[0107] As described herein, an “immune response” may typically either be a specific reaction of the adaptive immune system to a particular antigen (so called specific or adaptive immune response) or an unspecific reaction of the innate immune system (so called unspecific or innate immune response). The invention relates to the core to specific reactions (adaptive immune responses) of the adaptive immune system. Particularly, it relates to adaptive immune responses to infections by viruses like e.g. COVID-19 coronaviruses. However, this specific response can be supported by an additional unspecific reaction (innate immune response). Therefore, the invention also relates to a compound for simultaneous stimulation of the innate and the adaptive immune system to evoke an efficient adaptive immune response.

[0108] As used herein, the term “innate immune system,” or “innate immunity” also known as non-specific immune system, comprises the cells and mechanisms that defend the host from infection by other organisms in a non-specific manner. This means that the cells of the innate system recognize and respond to pathogens in a generic way, but unlike the adaptive immune system, it does not confer long-lasting or protective immunity to the host. The innate immune system may be e.g. activated by ligands of pathogen-associated molecular patterns (PAMP) receptors, e.g. Tol like receptors (TLRs) or other auxiliary substances such as lipopolysaccharides, TNF-alpha, CD40 ligand, or cytokines, monokines, lymphokines, interleukins or chemokines, IL-1, IL-2, IL-3, IL-4, IL-5, IL-6, IL-7, IL-8, IL-9, IL-10, IL-12, IL-13, IL-14, IL-15, IL-16, IL-17, IL-18, IL-19, IL-20, IL-21, IL-22, IL-23, IL-24, IL-25, IL-26, IL-27, IL-28, IL-29, IL-30, IL-31, IL-32, IL-33, IFN-alpha, IFN-beta, IFN-gamma, GM-CSF, G-CSF, M-CSF, LT-beta, TNF-alpha, growth factors, and hGH, a ligand of human Toll-like receptor TLR1, TLR2, TLR3, TLR4, TLR5, TLR6, TLR7, TLR8, TLR9, TLR10, a ligand of murine Toll-like receptor TLR1, TLR2, TLR3, TLR4, TLR5, TLR6, TLR7, TLR8, TLR9, TLR10, TLR11, TLR12 or TLR13, a ligand of a NOD-like receptor, a ligand of a RIG-I like receptor, an immunostimulatory nucleic acid, an immunostimulatory RNA (isRNA), a CpG-DNA, an antibacterial agent, or an anti-viral agent. Typically a response of the innate immune system includes recruiting immune cells to sites of infection, through the production of chemical factors, including specialized chemical mediators, called cytokines; activation of the complement cascade; identification and removal of foreign substances present in organs, tissues, the blood and lymph, by specialized white blood cells; activation of the adaptive immune system through a process known as antigen presentation; and/or acting as a physical and chemical barrier to infectious agents.

[0109] An “exon” refers to a defined section of nucleic acid that encodes a protein, or a nucleic acid sequence that is represented in the mature form of an RNA molecule after either portions of a pre-processed (or precursor) RNA have been removed by splicing. The mature RNA molecule can be a messenger RNA (mRNA) or a functional form of a non-coding RNA, such as rRNA or tRNA. The human IFNAR2 gene has 9 exons. An “intron” refers to a nucleic acid region (within a gene) that is not translated into a protein. An intron is a non-coding section that is transcribed into a precursor mRNA (pre-mRNA), and subsequently removed by splicing during formation of the mature RNA.

[0110] In certain embodiments, the relative expression and/or ratio of isoforms IFNAR2-L or IFNAR2-S may be a biomarker to predict cellular sensitivity to IFN. For example, as noted above abundant short isoform predicts reduced sensitivity to IFN, while more abundant long isoform predicts increased sensitivity to IFN. Such As used herein, a biological marker (“biomarker” or “marker”) is a characteristic that is objectively measured and evaluated as an indicator of normal biologic processes, pathogenic processes, or pharmacological responses to therapeutic interventions, consistent with NIH Biomarker Definitions Working Group (1998). Markers can also include patterns or ensembles of characteristics indicative of particular biological processes. The biomarker measurement can increase or decrease to indicate a particular biological event or process. In addition, if the biomarker measurement typically changes in the absence of a particular biological process, a constant measurement can indicate occurrence of that process.

[0111] As used herein, the phrase “gene expression” or “protein expression,” such as the level of “IFNAR2-L or IFNAR2-S gene expression,” or “the level of IFNAR2-L or IFNAR2-S protein expression,” includes any information pertaining to the amount of gene transcript or protein present in a sample, in a cell, in a patient, secreted in a sample, and secreted from a cell as well as information about the rate at which genes or proteins are produced or are accumulating or being degraded (e.g., reporter gene data, data from nuclear runoff experiments, pulse-chase data etc.). Certain kinds of data might be viewed as relating to both gene and protein expression. For example, protein levels in a cell are reflective of the level of protein as well as the level of transcription, and such data is intended to be included by the phrase “gene or protein expression information.” Such information may be given in the form of amounts per cell, amounts relative to a control gene or protein, in unitless measures, etc.; the term “information” is not to be limited to any particular means of representation and is intended to mean any representation that provides relevant information. The term “expression levels” refers to a quantity reflected in or derivable from the gene or protein expression data, whether the data is directed to gene transcript accumulation or protein accumulation or protein synthesis rates, etc.

[0112] As used herein, a the term “RNA interference molecule” or “RNAi molecule” means a RNA molecules that can modulate the expression of a target gene, for example through an RNAi-mediated reaction in a cell, for example by an siRNA, or through an alternative splicing event in a cell for example by an SSO, or through steric hinderance, for example by an ASO.

[0113] As used herein, “inhibit, “inhibition,” “suppress,” “downregulate” or “silencing” refers to partial or complete loss-of-function through targeted inhibition of gene expression in a cell and may also be referred to as “knock down,” of IFNAR2-L or IFNAR2-S preferably through an RNAi pathway response or through an endonuclease-mediated knockout, such as a CRISPR/Cas9-mediated knock-out of IFNAR2-L or IFNAR2-S. Depending on the circumstances and the biological problem to be addressed, it may be preferable to partially reduce gene expression or IFNAR2-L or IFNAR2-S, or both. Alternatively, it might be desirable to reduce gene expression as much as possible. The extent of silencing may be determined by any method known in the art, some of which are summarized in International Publication No. WO 99/32619, incorporated herein by reference. As used herein, “inhibit, “inhibition,” “suppress,” “downregulate” or “silencing” of the level or activity of an agent, such as, for example, a preRNA, mRNA, rRNA, tRNA, snoRNA, snRNA expressed by the target gene, and/or of the protein product encoded by it, means that the amount is reduced by 10% or more, for example, 20% or more, preferably 30% or more, more preferably 50% or more, even more preferably 70% or more, most preferably 80% or more, for example, 90%, relative to a cell or organism lacking a dsRNA molecule of the disclosure.

[0114] Moreover, the terms “enhance”, “overexpressed” generally refer to a statistically significant increase, for example in a trait, phenotype or level of actual or relative gene expression, preferably expression of IFNAR2-L or IFNAR2-S. For the avoidance of doubt, these terms generally refer to about a 5% increase in a given parameter or value, about a 10% increase, about a 15% increase, about a 20% increase, about a 25% increase, about a 30% increase, about a 35% increase, about a 40% increase, about a 45% increase, about a 50% increase, about a 55% increase, about a 60% increase, about a 65% increase, about 70% increase, about a 75% increase, about an 80% increase, about an 85% increase, about a 90% increase, about a 95% increase, about a 100% increase, or more over the control value. These terms also encompass ranges consisting of any lower indicated value to any higher indicated value, for example “from about 5% to about 50%”, etc.

[0115] The present invention may include novel systems and methods for use of a gRNA which may be utilized by the CRISPR/Cas9 system to disrupt IFNAR2-L or IFNAR2-S. Generally, CRISPR/Cas9 may be used to generate a knock-out or disrupt target genes by co-expressing a gRNA specific to the gene to be targeted and the endonuclease Cas9. CRISPR may consist of two components: gRNA and a non-specific CRISPR-associated endonuclease (Cas9). The gRNA may be a short synthetic RNA composed of a scaffold sequence that may allow for Cas9-binding and a ˜20 nucleotide spacer or targeting sequence which defines the genomic target to be modified.

[0116] As used herein, the term “antisense RNA” or “asRNA” refers to an RNAi agent that is a single stranded oligonucleotide. In a typical asRNA, the single strand is complementary to all or a part of the target mRNA. The complementarity of an asRNA may be with any part of the specific gene transcript, i.e., at the 5′ non-coding sequence, 3′ non-translated sequence, introns, or the coding sequence. asRNA may be introduced into a cell to inhibit translation of a complementary mRNA by base pairing to it and physically obstructing the translation machinery. Antisense RNA anneal to a complementary mRNA target sequence, and translation of the mRNA target sequence is disrupted as a result of steric hindrance of either ribosome access or ribosomal read through. The antisense RNA mechanism is different from RNA interference (RNAi), a related process in which double-stranded RNA fragments (dsRNA, also called small interfering RNAs (siRNAs)) trigger catalytically mediated gene silencing, most typically by targeting the RNA-induced silencing complex (RISC) to bind to and degrade the mRNA. Annealing of a strand of the asRNA molecule to mRNA or DNA can result in fast degradation of duplex RNA, hybrid RNA/DNA duplex, or duplex RNA resembling precursor tRNA by ribonucleases in the cell, or by cleavage of the target RNA by the antisense compound itself.

[0117] The term “subject” refers to any animal. In certain embodiments, the subject is a mammal. In certain embodiments, the subject is a human (e.g., a man, a woman, or a child). The human may be of either sex, or may be at any stage of development. In certain embodiments, the subject has been diagnosed with the mitochondrial condition or disease to be treated. In certain embodiments, the subject is an experimental animal (e.g., mouse, rat, rabbit, dog, pig, or primate). The experimental animal may be genetically engineered. In certain embodiments, the subject is a domesticated animal (e.g., dog, cat, bird, horse, cow, goat, sheep, or chicken).

[0118] As used herein, the phrase “in need thereof” means that the animal or mammal has been identified as having a need for the particular method or treatment. In some embodiments, the identification can be by any means of diagnosis. In any of the methods and treatments described herein, the animal or mammal can be in need thereof. In some embodiments, the animal or mammal is in an environment or will be traveling to an environment in which a particular disease, disorder, or condition is prevalent.

[0119] As used herein and in the appended claims, the singular forms “a”, “an”, and “the” include plural referents unless the context clearly dictates otherwise. Thus, for example, reference to “a plant” includes a plurality of such plants; reference to “a cell” includes one or more cells and equivalents thereof known to those skilled in the art, and so forth. Similarly, the word “or” is intended to include “and” unless the context clearly indicates otherwise. Hence “comprising A or B” means including A, or B, or A and B. Furthermore, the use of the term “including”, as well as other related forms, such as “includes” and “included”, is not limiting.

[0120] The term “about” as used herein is a flexible word with a meaning similar to “approximately” or “nearly”. The term “about” indicates that exactitude is not claimed, but rather a contemplated variation. Thus, as used herein, the term “about” means within 1 or 2 standard deviations from the specifically recited value, or +a range of up to 20%, up to 15%, up to 10%, up to 5%, or up to 4%, 3%, 2%, or 1% compared to the specifically recited value.

[0121] The invention now being generally described will be more readily understood by reference to the following examples, which are included merely for the purposes of illustration of certain embodiments of the embodiments of the present invention. The examples are not intended to limit the invention, as one of skill in the art would recognize from the above teachings and the following examples that other techniques and methods can satisfy the claims and can be employed without departing from the scope of the claimed invention. Indeed, while this invention has been particularly shown and described with references to preferred embodiments thereof, it will be understood by those skilled in the art that various changes in form and details may be made therein without departing from the scope of the invention encompassed by the appended claims.

### EXAMPLES

### Example 1: Experimental Rationale for the Present Invention

[0122] Although the short IFNAR2-S isoform has been assumed to be silenced and nonfunctional, re-analysis of both short- and long-read RNA-seq from human tissues revealed widespread expression of IFNAR2. Our analysis also revealed that the ratio of short and long isoforms is dynamically regulated in disease states including cancer and cells infected with viruses including SARS-CoV2. While the canonical IFNAR2-L isoform has been studied for decades, the present inventors conducted the first isoform-specific IFNAR2 knockout and silencing experiments in human cell lines. Using CRISPR on HeLa cells, the present inventors generated a series of clones with homozygous knock out deletions of exons specific to the short or long isoform, or an exon common to both isoforms (full knockout). Wild-type, IFNAR2-L knockout, IFNAR2-S knockout, and full knockouts were evaluated using a series of complementary assays for IFN signaling. These included immunoblotting for phosphorylation of STAT1/2, qPCR of IFN-stimulated gene induction, and assessment of cytotoxicity induced by IFN treatment.

[0123] As expected based on the known function of the full-length IFNAR2-L isoform, specific knockout of the IFNAR2-L exon or a full knockout of both isoforms resulted in ablation of type I IFN signaling. However, specific knockout of the short IFNAR2-S isoform resulted in an increase in type I IFN signaling. These results showed consistent trends across different methods to assay IFN signaling. These results were reproduced using isoform-specific siRNA experiments instead of CRISPR, in both HeLa and A549 cell lines. Furthermore, IFNAR2-L or IFNAR2-S were overexpressed in wild-type and knockout backgrounds, and assayed the cytotoxic effect of IFNB treatment in comparison to control cells. Overexpression of IFNAR2-L resulted in increased sensitivity (based on cell viability) to IFN signaling, while overexpression of IFNAR2-S resulted in decreased sensitivity to IFN signaling. Together, the present invention reveal a novel role for IFNAR2-S functioning as a decoy in human cells.

### Example 2: IFNAR2-S is the Main Transcribed Isoform

[0124] Junction read counts show higher splicing of the short isoform of the type I interferon receptor gene (IFNAR2-S). Histogram shows the relative abundance of the main IFNAR2 isoforms across multiple human healthy tissues and cell lines. In contrast to the prevalent view oh higher splicing of the full-length functional isoform (IFNAR2-L), exon-exon junction read counts from Illumina RNAseq datasets support higher prevalence of the alternative isoform IFNAR2-S.

[0125] As shown in FIG. 7, Long read RNA sequencing support higher splicing of the short isoform of the type I interferon receptor gene (IFNAR2-S). The UCSC genome browser (genome.ucsc.edu) was used to analyze read coverage from matched Illumina short read RNAseq and Oxford Nanopore long read RNAseq samples over the IFNAR2-S (highlighted in orange) and IFNAR2-L genomic locus. Both sequencing strategies show that the short IFNAR2-S isoform is highly transcribed in virtually all tissues. On top, read coverage for Illumina short read RNAseq samples is shown. At the bottom, long read RNAseq for the same samples is shown as individually sequenced reads.

### Example 3: Dysregulation of IFNAR2 Isoform Ratio in Cancer

[0126] As shown in FIG. 8, alteration of the physiological IFNAR2-L to IFNAR2-S relative isoform abundance is a phenomenon in cancer. Histogram shows the relative abundance of the main IFNAR2 isoforms across multiple matched human healthy and cancer tissues and cell lines. On top, average normalized expression levels for IFNAR2-L (in blue) are reported for matched tumor (on the left in the pair, in light blue) and healthy samples (on the right In the pair, in dark blue). At the bottom, average normalized expression levels for IFNAR2-s (in orange) are reported for matched tumor (on the left in the pair, in light orange) and healthy samples (on the right In the pair, in dark orange). Isoform dysregulation was detected in both directions, either as a reduction of the L:S ratio (like in leukemic cells, LAML) or an in increased L:S ration (like in ovarian carcinomas, OV). Normalized count data (TPM, transcripts per million) were obtained from the GEPIA2 portal (http://gepia2.cancer-pku.cn/).

### Example 4: Dynamic Changes of Relative IFNAR2 Isoform Expression During Infection

[0127] As shown in FIG. 9, long read RNA sequencing show dynamic changes in the relative IFNAR2-L to IFNAR2-S ratio upon viral infection. The UCSC genome browser (genome.ucsc.edu) was used to visualize read coverage from Oxford Nanopore long read RNA sequencing over the IFNAR2-S (highlighted in orange) and IFNAR2-L genomic locus. Control A549 cells show lower IFNAR2-L expression levels than IFNAR2-S (˜1:3 ratio). Upon infection with Covid-19, an increase in IFNAR2-L expression levels can be detected (1:1 ratio), consistent with data from Calu3 cells (FIG. 10).

[0128] As shown in FIG. 10, Short read RNA sequencing show dynamic changes in the relative IFNAR2-L to IFNAR2-S ratio upon viral infection. Boxplots show changes in expression levels of IFNAR2-S and IFNAR2-L upon viral infection in vitro. Calu3 cells (left) have higher IFNAR2-S baseline expression levels. SARS-Covid19 infection time course analysis reveals a shift in the relative expression levels of IFNAR2-S, that slightly decreases over time, and IFNAR2-L, which increases over time. Increased levels of IFNAR2-L is consistent with observations in A549 cells infected with Covid-19 (previous slide). A contrasting trend is observed in A549 cells when infected with the Influenza B virus. FIG. 11 shows that IFNAR2-L is required for STAT phosphorylation and signaling activation and specifically the absence of phosphorylation of STAT1 and STAT2 in mutant cell lines lacking IFNAR2-L (2L-KO and double KO) or the region binding IFN (IFNAR2 KO).

### Example 5: IFNAR2-L is Required for STAT Phosphorylation and Signaling Activation

[0129] As shown in FIG. 12, the absence of phosphorylation of STAT1 and STAT2 in mutant cell lines lacking IFNAR2-L (2L-KO and double KO) or the region binding IFN (IFNAR2 KO). Assessment on STAT1 and STAT2 phosphorylation upon IFN treatment in HeLa mutant cell lines. IFNAR2 mutant HeLa cell lines were treated for 30 min with 10 U/ml of IFNb (Treated) before harvesting. ˜12 ug of whole protein lysate was loaded under denaturating conditions. Phosphorylation of STAT1 (which is bound to IFNAR1) and STAT2 (bound to IFNAR2) represent the first step in the type I IFN pathway activation. Our western blot indirectly validates our CRISPR/Cas9 editing and confirms previous observations that only in the presence of a functional IFNAR2 receptor (wild-type cells, WT, and IFNAR2-S KOs, 2S-KO) the signaling cascade is activated.

### Example 6: IFNAR2-S Knockout Increases Stimulation of IFN-Stimulated Genes

[0130] As shown in FIG. 13, knockout of canonical IFNAR2-L impairs ability to activate IFN-stimulated genes, and that knockout of IFNAR2-S leads to higher inducibility of the IFN-stimulated genes (eg, OASL and ISG15), consistent with decoy activity. Knock out of IFNAR2-S brings to higher activation of the type I IFN signaling pathway. Histogram shows the normalized expression levels of two canonical interferon stimulated genes (ISGs), OASL and ISG15 across mutant HeLa cell lines generated for this project as measured by RT-qPCR. For each cell line, 3 different clones generated by CRISPR/Cas9 genome editing were used, whereas for the wild-type (WT) we used two pseudo-biological replicates. At 4 hours post treatment with 10 U/ml of IFNb, treated and control cells expression of ISGs upon IFN stimulation in mutant cell lines that lack the decoy receptor IFNAR2-S (2S-KO, in yellow were harvested in lysis buffer. For each sample, we averaged Ct values from 3 technical replicates (dots). Normalization was first performed in respect to the Ct of the CTCF gene, here used as housekeeping (DCt), and then in respect to the matched untreated group (DDCt). Significance of changes in expression levels between treated and untreated (*) was assessed performing a chi-square test. In line with our expectation, we observed higher w) compared to wild type cells (WT, in dark grey). We saw no significant changes in ISG expression levels when the functional IFNAR2-L is deleted (2L-KO, in blue), in the double 2L-2S KO line (double KO, in purple), and in the IFN unresponsive line (IFNAR2-KO, in maroon).

### Example 7: IFNAR2-S Knockout Increases Cytotoxicity in Response to IFNB

[0131] As shown in FIG. 14, knockout of IFNAR2-L impairs response to IFNB treatment and Decitabine (cytotoxic DNMT inhibitor that acts through IFN signaling), and knock out of IFNAR2-S leads to increased cell death upon IFNB treatment, compared to WT cells. Knock out of IFNAR2-S brings to less proliferation and higher cell death. Histograms show the normalized results of a crystal violet staining assessment of cell density across HeLa mutant cell lines upon treatment. Clones were grown in presence of IFNb (10 U/ml) for four days (left) or in presence of Decitabine (DAC) for six days (right). Control cells were grown with matched concentrations of PBS for the IFN treatment experiment and DMSO for the DAC treatment experiment (to match the drug resuspension media). Media was replaced after 24 h for the DAC experiment with complete culturing media to allow the cells to grow in absence of DMSO. Once control cells reached confluency, cells were passaged at a lower density, and subjected to crystal violet staining. Based on cell density in the most confluent control wells, the dilution factor was optimized and then kept constant for all clones in the same experiment (i.e., if 1:100 dilution factor (10 ul of cell suspension) was established based on the representative well, all wells for the same experiment were seeded at a 1:100 dilution, regardless of the individual cell density). For each sample, we averaged absorbance values from 3 technical replicates. Significance of changes in cell density between treated and untreated (*) cells was assessed performing a pairwise t-test. Significance of changes in expression levels between treated and untreated cells across cell lines is reported at the bottom of the histograms and was assessed performing a pairwise emmeans contrast test in R. In line with our expectation, we observed reduced cell density in the wild-type and the IFNAR2-S KO cell line (2S-KO, in yellow), and a further significant reduction when the 2S-KO is compared to wild type cells (WT, in dark grey). We saw no significant changes in cell density when the functional IFNAR2-L is deleted (2L-KO, in blue), in the double 2L-2S KO line (double KO, in purple), and in the IFN unresponsive line (IFNAR2-KO, in maroon) in the IFN treatment experiment. Given the broader target spectrum of the DAC drug, we detected reduced cell density in all cell lines; however, trends were still consistent with the IFN treated cells.

### Example 8: IFNAR2-S Knockout Increases Cytotoxicity in Response to IFNB

[0132] As shown in FIG. 15, specifically that knockout of IFNAR2-L prevents cytotoxic effect of IFNB, and knockout of IFNAR2-S leads to higher cell death and less proliferation by IFNB. Effects of IFN treatment of HeLa with different genomic backgrounds at the IFNAR2 locus. KO mutant Hela cells were grown in 10 U/ml of IFNb for 5 days (bottom row) or with equivalent concentration of PBS (resuspension media of IFNb; top row). After 5 days, pictures were taken using the camera integrated in the microscope at a 4× magnification. Wild type HeLas (WT) respond to IFN with moderate increase in lethality and a slight growth delay. IFNAR2-S KO clones show a more dramatic response to the treatment, whereas IFNAR2-L and IFNAR2 KO cells show no effect of the treatment. The difference between WT and IFNAR2-S KO clones support our hypothesis that IFNAR2-S represents a functional decoy receptor for the type I IFN pathway.

### Example 9: Modulation of IFNAR2-L and IFNAR2-S Transcript Levels in Overexpression Cell Lines in Knockout Backgrounds

[0133] As shown in FIG. 17, preliminary screening of overexpression cell lines. Upon Stable overexpression of IFNAR2-L and IFNAR2-S in multiple cell lines was preliminary assessed by looking at isoform-specific transcript levels. RNA for each cell line was extracted and then reverse-transcribed into cDNA. IFNAR2-L and IFNAR2-S transcript expression was assessed through PCR and electrophoresis using isoform-specific RT-qPCR primers that span the junction between exon 8 (shared exon) and the Alu-Jr derived exon (IFNAR2-S fw) or exon 9 (IFNAR2-L fw). In A549 cells, similar physiological expression levels of the two isoforms makes this approach less valuable. However, in HeLa cells IFNAR2-S is physiologically more expressed than IFNAR2-L, and this allowed for a more straightforward confirmation of our method. Similar confirmation was obtained for overexpression cell lines with a IFNAR2-L KO, IFNAR2-S KO and IFNAR2 KO genetic background. CTCF was used as housekeeping for cross-sample comparisons.

### Example 10: Overexpression of IFNAR2-S Decreases IFN Signaling

[0134] As shown in FIG. 18, overexpression of IFNAR2-L increases cytotoxic effect of IFNB in all KO backgrounds, and overexpression of IFNAR2-S decreases cytotoxic effect. Effects of overexpression of IFNAR2-L and IFNAR2-S on cell proliferation. Histograms show the normalized results of a crystal violet staining assessment of cell density across HeLa and A549 cell lines upon treatment. For the detailed experimental protocol please refer to slide 19 (cell viability assay for HeLa KO cell lines). For HeLa cells, significance of changes in expression levels between treated and untreated cells across overexpression cell lines with the same genomic background is reported on top of the histograms and was assessed performing a pairwise emmeans contrast test in R (contrast(emmeans(model, ˜Construct*Condition), interaction=“pairwise”). The same test (model, ˜Genotype*Construct) was performed to assess whereas the change in cell proliferation (D proliferation) between 2L and 2S overexpression cell lines was significant across lines with different genomic backgrounds (contrasts at the bottom of the histograms). Upon further normalization in respect to the empty vector (not shown), analyses also helped assessing whether we were able to rescue KO cell lines (for instance, D proliferation is not significance between WT and IFNAR2-S KO cells). For A549 we also tested if shifts in relative isoform expression were able to affect cell sensitivity to IFN. For instance, upon overexpression of IFNAR2-L, cells become more sensitive to IFN (* at 1 U/ml). *=Untreated vs. Treated p-val<0.05.

[0135] As shown in FIG. 19, overexpression of IFNAR2-L leads to higher cell viability upon treatment, and overexpression of IFNAR2-S leads to higher cell viability upon treatment. Effects of overexpression of IFNAR2-L and IFNAR2-S on cell viability. Histograms show the normalized results of a CellTiter Glo assay of cell viability across HeLa and A549 cell lines upon treatment. Cells were grown in 6 well plates and treated for 3 days in the presence of IFN or for 6 days in the presence of DAC. Cells were then detached and counted. 10,000 cells per each genotype and construct were seeded in triplicate; for the DAC experiment, cells were not treated further. The CellTiter Glo assay, an ATP-base assay for detection of viable cells, was performed the following day. Statistical analyses and data interpretation was performed as for the Crystal Violet assay (FIG. 18).

### Example 11: Isoform-Specific siRNA Recapitulates CRISPR KO

[0136] As shown in FIG. 21, isoform specific knock down of IFNAR2-S leads to higher activation of the type-I IFN response. Knock down of IFNAR2-S brings to higher activation of the type I IFN signaling pathway. Histograms show the normalized expression levels of two canonical interferon stimulated genes (ISGs), OASL and ISG15 across HeLa and A549 cell lines as measured by RT-qPCR. Cell were transfected in triplicates with a negative control siRNA, a combo of 2 custom designed siRNAs against the IFNAR2-S isoform (anti-IFNAR2S) and the IFNAR2-L isoform (anti-IFNAR2L). Three days after transfection, cells were treated for 4 hours with 10 U/ml of IFNb and then harvested in lysis buffer. Equal amounts of extracted RNA was used for reverse transcription and quantitative PCR. Normalization was first performed in respect to the Ct of the CTCF gene, here used as housekeeping (DCt), and then in respect to the matched untreated group (DDCt) and in respect to the negative control siRNA. Additionally, we assessed changes in expression levels of IFNAR2-S and IFNAR2-L to validate isoform knock-downs (˜70/80% reduction). In line with our expectations, we observed higher expression of ISGs upon IFN stimulation in cells transfected with the anti-IFNAR2S combo compared to negative control transfected cells. Similarly, we saw a decrease in ISG expression levels when expression of the functional IFNAR2-L is knocked down. We performed a chi-squared test to assess the significance of changes in gene expression levels.

[0137] As shown in FIG. 22, isoform specific knock down of IFNAR2-S leads to lower cell proliferation upon treatment. Knock down of IFNAR2-S brings to less proliferation and higher cell death. Histograms show the normalized results of a crystal violet staining assessment of cell density across HeLa and A549 cell lines. An additional plate was prepared for transfection (as in slide 26), but cells were allowed to grow in presence of IFN for additional 3 days. Cells were then passaged with or without IFN at a lower density (1.100 dilution) and subjected to crystal violet staining the following day. For each sample, we averaged absorbance values from 3 technical replicates (dots). Significance of changes in cell density between treated and untreated (*) cells was assessed performing a pairwise t-test. Significance of changes in expression levels between treated and untreated cells across knock down cell lines is reported at the bottom of the histograms and was assessed performing a pairwise emmeans contrast test in R. In line with our expectation, we observed higher expression of ISGs upon IFN stimulation in mutant cell lines that lack the decoy receptor IFNAR2-S (2S-KO, in yellow) compared to wild type cells (WT, in dark grey). We saw no significant changes in ISG expression levels when the functional IFNAR2-L is deleted (2L-KO, in blue). We reported also results from matched experiments using HeLa mutant cells lines (CRISPR/Cas9, on the left) and Sequence-Specific Oligonucleotides (SSOs) designed to block the splicing and processing of the IFNAR2-L (anti-2L, in blue) and the IFNAR2-S (anti-2S, in yellow) isoforms, as well of Exon 7, which is involved in binding to IFN molecules.

### Example 12: IFN Signaling can Depend on Relative Ratio Rather than Raw Abundance of IFNAR2 Isoforms

[0138] As shown in FIG. 23, IFNAR2-S may act as a transient trap of IFN. (A) Mutant HeLa cell lines were treated with 1 U/ml of IFNb for 24 h and 48 h, when media was collected and subjected to ELISA. On top, the standard curve for IFN concentration shows different levels of IFN internalization across mutant CRISPR/Cas9 KO lines and wild-type HeLa cells that are independent of IFN decay when left for 48 h in incubation at 37 C in absence of cells (black dot). Residual concentration of IFN in the culturing media was calculated by using a 4-parameter fit for the standard curve, correcting for the absorbance of untreated media background. (B) The box plot reflects the inferred residual IFN concentrations in the different cell lines (three biological replicates each) through time. Compared to wild-type HeLas, the IFNAR2 KO cell line shows the lowest levels of IFN internalization. Depletion of IFN from the media compared to culturing media without cells suggest either IFN internalization through IFNAR1, or cellular production and release of compounds that can destabilize IFN molecules. Different patterns between IFNAR-S KO, IFNAR2-L KO and IFNAR2 KO cell lines, on the other hand, does not support internalization of IFN through the IFNAR2-S receptor, although there is support for a transient binding of IFN. Although more mechanistic data is required, this experiment seem to support our claim that the ratio between IFNAR2-L and IFNAR2-S may be critical for cell responsiveness to IFN and the strength of IFN signaling.

1-26. (canceled)

27. A method of modulating a response to type I Interferon IFN) treatment in a subject in need thereof, comprising modulating the relative ratio of type I interferon receptor gene isoform IFNAR2-L and type I interferon receptor gene isoform IFNAR2-S, wherein the level of IFNAR2-L is greater than IFNAR2-R, and wherein the method increases the sensitivity to the INF treatment in the subject.

28. The method of claim 27, wherein said step of increasing the sensitivity to IFN treatment comprises upregulating expression of IFNAR2-L.

29. The method of claim 27, wherein said step of increasing the sensitivity to IFN treatment comprises downregulating expression of IFNAR2-S.

30. The method of claim 27, wherein said step of increasing the sensitivity to IFN treatment comprises knocking out all or part of the gene encoding IFNAR2-S.

31. The method of claim 30, wherein said step of knocking out all or part of the gene encoding IFNAR2-S comprises the step of CRISPR/Cas9-mediated knocking out all or part of the gene encoding IFNAR2-S

32. The method of claim 27, wherein said step of increasing the sensitivity to IFN treatment comprises administering an effective amount of one or more siRNAs targeting the expression of IFNAR2-S.

33. The method of claim 32, wherein said one or more siRNAs comprises one or more siRNAs derived from the sense and antisense sequences selected from SEQ ID NO.'s 1438-1773.

34. The method of claim 27, wherein said step of increasing the sensitivity to IFN treatment comprises administering an effective amount of one or more antisense oligonucleotides (ASOs) targeting the expression of IFNAR2-S.

35. The method of claim 34, wherein said one or more ASOs comprises one or more of ASOs selected from SEQ ID NO.'s 3201-3533.

36. The method of claim 27, wherein said step of increasing the sensitivity to IFN treatment comprises administering an effective amount of one or more splice-switching oligonucleotides (SSOs) configured to mediate preferential splicing of IFNAR2 to generate IFNAR2-L, and wherein said step of preferential splicing comprises preferential splicing of exon 9 of IFNAR2 to preferentially form IFNAR2-L.

37. (canceled)

38. The method of claim 36, wherein said one or more SSOs comprises one or more of SSOs selected from SEQ ID NO.'s 3502, and 3504-3634.

39. (canceled)

40. A method of modulating a response to type I Interferon (IFN) treatment in a subject in need thereof, comprising modulating the relative ratio of type I interferon receptor gene isoform IFNAR2-L and type I interferon receptor gene isoform IFNAR2-S, wherein the level of IFNAR2-L is less than IFNAR2-R, and wherein the method increases the resistance to the INF treatment in the subject.

41. The method of claim 40, wherein said step of increasing the resistance to IFN comprises downregulating expression of IFNAR2-L.

42. The method of claim 40, wherein said step of increasing the resistance to IFN comprises upregulating expression of IFNAR2-S.

43. The method of claim 40, wherein said step of increasing the resistance to IFN comprises administering an effective amount of one or more siRNAs targeting the expression of IFNAR2-L.

44. The method of claim 43, wherein said one or more siRNAs comprises one or more siRNAs derived from the sense and antisense sequences selected from SEQ ID NO.'s 8-1437.

45. The method of claim 40, wherein said step of increasing the resistance to IFN comprises administering an effective amount of one or more antisense oligonucleotides (ASOs) targeting the expression of IFNAR2-L.

46. The method of claim 45, wherein said one or more ASOs comprises one or more of ASOs selected from SEQ ID NO.'s 1774-3200.

47. The method of claim 40, wherein said step of increasing the resistance to IFN comprises administering an effective amount of one or more splice-switching oligonucleotides (SSOs) configured to mediate preferential splicing of IFNAR2 to generate IFNAR2-S, and wherein said step of preferential splicing further comprises preferential splicing of exon 9 of IFNAR2 to preferentially form IFNAR2-S.

48. (canceled)

49. The method of claim 47, wherein said one or more SSOs comprises one or more of SSOs selected from SEQ ID NO.'s 3149-3171, and 3534-3604.

50-61. (canceled)

The application's sequence listing, which the Patent Office published only in electronic form, follows.

SEQUENCE LISTING (3635 sequences)

SEQ ID NO: 1 - DNA, 34619 bp, Homo sapiens
  source 1..34619: mol_type = genomic DNA
gcccccgcccccgcgccggcggcggcgcggcgcccgcgcttccgtatcgctcctcgtaggccggggctcggcgcgcgcacccgcactaaagacgcttcttcccggcgggtaggaatcccgccggcgagccgaacagttccccgagcgcagcccgcggaccaccacccggccgcacgggccgcttttgtcccccgcccgccgcttctgtccgagaggccgcccgcgaggcgcatcctgaccgcgagcgtcgggtcccagagccgggcgcggctggggcccgaggctagcatctctcgggagccgcaaggcgagagctgcaaaggtaacgcagcgtggcggggtcgcgggagcggagcgcgtggccagctgactggagggaaaacgccgcctccctgcagcggttcccggaatcccctccggttccctctcgctctccccgactcctcctcctcctcctgccctccctctgcgtcttgagtatgcggctagtgcgcccttcctctctcccggggccgcacctgcgaccccaggacccctcccgggccctgtcctgcgccctccacgcgtcgcccctgctgggagtccgctttcgttgcacccctccgcgtcccaccccaccccaccaaggatgcccaggataccgggcatttgccactgcaagatgtgagtcgttgctaagtttgagggtcacattcctccaggtccaccccgccttgcaaaaccggctcaccagctgggtgctcaggttcgggatctccagcccgcccccttgaggtcccctgggattagcccccctcgacctgcgtcagggtcacagactgcagccggggctggagcggcctacacccctccggatccgctgcgtggaggcaggagggggaaggggcgaggggacgtggccgcggagacagaagggtgcaccctcccagggtcggagaggggagatactgggaagatactccgcgaatatggagaggcgatcggcacttgcatttcaaccctgagcaaatcaatccgttacacgcagtagcgagttgactccatcagcccgtttatttggttagcgatggttatattgactctgagtattcccacctcctttcttttaacatttttttttttatttccttgttttgtttagcaagaagtcttagaaacgaatatagcatgcttgggcgttgattcagtggtgagaagtgccggagctggctcagggagaggtggagtttcccatgtgtgctcactggcccaggggctaagtcccactgcttgccaaggtttctcagtatcctgtccacccaccccctatccacctgtgcaggcttgagggggtgagggggtagcagatactctatcaaaatctaccctaaggaaaatattcgataaacactcctagcaattagggcatagctgataaggcttgatctgtttgtcgcagaaaatgacttgaacttgtaagttctattgttcataaagttgttttccacaattttagataatcaaaaatgtacatgactcatttttcttacctattatttcctctaaagtttctcatgtatttattgaaaagttaaagaaaatctgattttggttcacataatttgacaatggtgatttgtctaaaagtcatttcaaaaagtagtatgaaaaggatcataaccctagaggtactgtcatagacgtgaaacatttattaaaatatatattccatggctcacacttgcacactcaaagccacattggactcattttttctgctacctttataaaccttcaaactgttcaagagtcaatggtatgtatcatcttccgttatcaatcatcatgttttgttttgtttggtttggtttggtttggtttggtttttgacaaagtctcgctctgtcgcgcaggctggagtgcagtggcactgtcttggctcactgcaacctccccctcctgggttcaagcgattcttctgcctcagcctcttgagtagctgagattacaggcgtgtgctactacgcctggctaattgtatttttagtagagatgggatttccactatgttacccagcctggtctggaacttctgacctcaaatgatccacctgctttggactcccaaagtgctagtattacaggctcaatcatcatgttttatcaaagctaaaacccaaactaaaatgccattgcttataagatgcactttcattttatgtaatgaagtaagaaaaaacactgtcaatcatgctatgccatgccaccagaatgaaagcattctgatttcagaaattctcaaatgttaaaagaaaatgggcattttataatttgtgaaatattagtgagttagagcagagcttgacggcactggccctgagggtccttcttcttcctttggaagaatgaaactgggggctatgcaattcagggaagaataaaggaaaaacaggtaattggcagaggaggttggctgacttagaggtatggaaaagacaaaacaaaggagggaaaaagagaggtatgtatgatggggaggagttcagagccactgaaaattttctctggccctaacaggaaaacgagttaccccacaagccagggttttatcatctggtacgtggagatatccatcagcattgtcattggttttcatttgtttgtttttaattctcaagtttaaaaaaaaatttaaaatttaaatgtgtctcaaccaccagaaactatagtgagatttctctgtaataaataggaaagaaggagactgatccagtccttgttaaaaaaaaaaaaaagaggaaactgaatcacaacatactttgcttttttcttttctcacaaaggaacagtgggccctttatgctgggtgaaggtgagtgagatgggggaaggttcactgggcaccaaccttctgggctagagaaattgcccaggctttacagaacaagctggaatcagataaagttgtggaaaggaagtcgaggtttcactctgccatatcagtaggaggtactaaagccaaactagtagcagcaaagtgaacagaaatggtaagggggaaaaataggaaaggaaagaacaacgtggattgcaagacgtcttactaaaaacaaagaattacacttggaacagaagaaattcattaccattgccttacactgtgcaacaacttgataaaaatataaatccaataaaacaaactcaaagatgagaaaattgtaaactggagatgaaaagggagattgcagacctaaaggaaaattgaagaccgtaaaaacatagtgacagaataaataagtcaggagaaagaacagaagcaatactgctgaaaataaaagtattttaatagaagaaagcccagtaaggaagcccagtaaattcaactgaaaagggacaaagattaagaagaaagaagctattatgaaagacaaaatacaatcaagaattgggaccactgaagtcccagatgtagagaagtcaacaaatgggacagaaaattcaaataaaaataagtccaaagaaagcttattgagatgaagaaaaaatggtctgtaggccaaaggaacatgccatgttccagaaaatgtcatgtgggaatacggaagcactacgatatcttaaactatttaaattcaaagaaaaagatttaggaatctaagaagaaaaagtaaaggagggaaaaacaaaatcaagctcgcctcagacttcagtgcagcactaaatgccagactatgatggttgtgaggaaacagttccaagggaaagaaacttttccgaggggcatattttttttccggaagaacaaagggaattcagcacccatgaaccgtttttggaaaaacaaaaacttgctgagtaataaaatccaggaaatagcaaattaagagataaatcaaaataaagaacttaagagtagagaaaggtaaaaagacttggtgagtatttattctatttaaatatagaagtaatacatctatagaaattgtgggtaagatagaatgcgattgttattaatctagacaaaaatatacagccaaaaaaaaaagaagtcagagaggaagatggaaggaaacatgagaataccaatattctcttctttcaaagaatggaatagtaaatatggtataaaattaaaagatgctatgtgaatatataatactgcaacttttaatatctttcataagttttatttaaaaccttagagggatatcataggaaattatactttcttatggacaaaaaaatttaaattttaacaactcctttgactttattttagtcttttcccaagtaacattaaacagaaacactgtgtgtgtgtgtgtgtgtgtgtgtgtgtgtgtgtgtgtgtttatgcatagaaagatctgtgggattatgttcgcctaatattaatgatagtaatagtttttacagaagaaaaaagaaagatgtttgaaaaataagctagaatcaaatatgccaagatgttaacaattgttgatgctggatggtaggaataaggatgagtgttactttcttatttgtactttttcatatttttctaatttccagaaaaagatatgtaattgtttttgtctaacatttctgaatccacttcattcattattcattgcctccttgacaatgtgcatcagtctatgtcaaacagaaggaaagacacagccatactttaccaggagactatgaggcagcgagttcctggagggttgtttgtctgtctaggaggagttggaattcaaagaatcacttcactcaatccatccattttatctgggccttgaaaattggcagggtttgtctggtctcagggtgaatagcaggtagagctcttctttcagaatggagaaggccacagtgtcacagggtgaacctgtgacaaaattggggttcagcctgggaagccacatgagttgttggcttcgcacaggatggaattaaagagcaagctgacagaattaagtgaaagcaagtttattaagaaagtcaaggaatgaaagggtggctactccataggcagagcagcagcatgggctgctccactaagtatacttatggttatttcttgatcatatgctaaacaagtggtggattattcataagttgtctgcaaaaggggtgggagttctggaactgagggttcctcacttttttcgatgatatagggtaacttctgcatgttgccatggcatttgtaaactgtggtggcactggtgggagtttcctttagcatgctaatatattgtaattagcatatgataagcagtgaggacagttttgtcaccatcttggttttggcaggctttggccagcttctttactgcgtcctgtcttatcagcagggtctttgtgacctcctgttttatcacataactaagaatgcctaaccccctgggaatgcagcccagcaggtctcagcctcattttacccagctgctactcaagatggagtcactctggttccaacacctctgacaagagcagggggtgacctgtcacctggggctcagcaggacaataactctaggaaaaactggaaaggctgatagccttgaatttaacctaaggagcttggtgcattgtcaggcaacagtgagctacagactgagctcactacataattcacagggcccacccagagccaaataaaaatgcctgagaaagtaccactaaaggtactaaaatataaagccttttcttccacagtctctctctctcaacacgtaatgtttttttgtttgctatttaatatcattctaagtaaaaaaataggccgggcatggtggctaacgcctgtaatcccagcactttgggaggccaagtcaggtggatcatgaggtcaggagatcgagaccatcctggctaacactgtgaaaccccgtctctactaaaaatacaaaaaattagctgggtgtggtggcgggcgcctgtagtcccagctactctggaggctcaggcaggagaatggagtgaactcggaaggcggagcttgcagtgagccaaagtttgcgccactgcactccagcctgggggacagagtgagactctgtctcaaaaaataaaataaaataaaaaataaaaataaaaacttgaattattagcatgaatattgcagttctttatattatgcaaaaccagatttaaataagagcatttaattcatatatggaattgccaagttataccattagtactttacagcacatcttgggaggttcccttgaactagccagaagaagcaaactgaagccagacagaggaagattgcaaagaggaagagagggtctccaccaggcacagagccacccaagggagccctccctcaggctcagggataccgagggagccagagcagattcacacaggtccctggggcccctctgccctggtgactctaggatgcatgtacttgcacctgacttctaggcatccccctcctgctagcttcccctcgatccagcctggggcaggctctgtggaagtcaagccttgcatctccctttcccaagcacctaccatcctaacccacagtgtagtggccacgtccaagggtctttacgtctctgcctcagatatgctaggtacctgggtcaagagtgacccagagactcatccctgccagacccaacctccagccagtcaccctctgactccagtccatggggcgaggctggagtgctggccctgacctctccagcatctgcaccaggagggcttcagcggaatgtggtcccagttgatgccccatgccaacagtagcagcagcagttgttaggcatagagattgaagccagacagggcctgggattcctctgctgggagcctaaactgcaggagatggggaaggatccaagtgtgagctggggctcctagcacaaaactcacattgaaagataaaatggttaagaatttcaggatagccacaggagaacctcaagccaagtgtaggatccttctagctgcagggcctgggggtactgagactagccctgttgacaggagccatgctttaggaagactgatctatttgtagtcagcaagagttttaaggagctccattaacaatttaggcacgatgccaagatgggatattatattttccaagcaagaagaatctggtaatcaggcatatggttccaagtgaagtataagtcaccagaaagcaaggaaggaagccatcccctggcccagagggggagaatggggtgtgtgtgtgtgtgtgtgtgtgtgtgtgtgttttctcggctgctgaagagactgagtgttcctgcagatatataacaaagatgaagatgtgccaccgttggagacaaatggggaccagaggccacatgtcagaggtcaggtcaggtgttcaaatataaaggggttgccctggctgggcatggtggctcacatccataatccaagccctttgtggggctgaggccggaggatcacttgagcccaagagttcaagaccagcctggacaacatagcaaagccccatctctaaaaaaaaaaatacaaaaattagccaggtgtagtggcaaatgcctgtagtcccagctacttgggaggctgaggtgggagaatcgcttgagcccaggaggcagaggttgcagtgagccgagatcacaccactgcactccagcctgggtgacagagtgagaccctgtctcaaaaaataaagaagttgcccttctacaatctggatgtggtggtatctaggggaatgttcacaactaggcaacgcctctgctgtggattgattatgggagatgacatcacacatcaagatatctcagcagatgtttctcaatgggtacagtattatgggattagttccaggcagtcgtgcttggatatctcatgggtggtggagtctgtagcaaggctggaaattttgacttggaatcacttggatttctctaagagaataccccaggttggatgtgttactgtggcagcagagaagacttaaaaattacattgtttttagcttgaacttcgtcttgtgaagtcctaattagggaagaggagtcaggctgggggtctaggggaaagcaaagagataaagcagataagccataggtctaccttgcttcatggtccaggacatacaaacaaaaagaagaagcagataagctataggtctgcctttctttatggcccaggacatacgaccctcctgcacacataactcacaatcttcctgcgtatcatcaaatgcttcaacttatcatcaaacatctcggctgaccgaaaaatgcaagttagctccctgctaccttggcgttgtcagtcctccacatagcactcttcagcttaaattgcattttataaaatccccagcaagcctttgtctcctggcagtcaactcgtctcttactgacctgcccattgctcccttgcaatgtattttcctactttctctaataaatctgcctttcttgacctaaactgtcatggtaaattcttcttactcctatgtcaccagccacagacagtcgccacaagccatgacaagtctgcgatttcatggtctttttttattttgatgatatttccccagtgtttgggggacagaagaatgcccacaatctataggtcttagtcacatggatggggacagaatatctgagagagagagaaggaacaagatctactggggctccttaaaattcttcttgaagaactcctttctcaccttggagtagggaagactttctgattatgactcaaaatttagaagctaagaaagaaaatacctttaaatctgaaaacataaaactcaaaaacttctgggtgtttttttgggggggttgttttttttaaacagcacaagcaactcaaagggcaagtgacaaactggggagagaagaaaaagatgtgactcatatcacagtttcccttctacttaaaaaaaaaaaaaactgcaaaccagtaagaaaatagcaacagctcaacagaaaaattgccaaaggcacgaacagttaatgagaaggagatgcaaatcgctcttaaacctatgaaaagatgaaggtgttccatcacaaagagtaagagaaatacaaattaatattaatgtgaaagacaacttttcatttatgaatttgagaaaaatccaagaacttgatgatatacctctaagaagcaacggtagggaaacgaaaattctcacacattgcaggtggttatgtaaattggtatagccccgcgggtggtcagtgtgacagtttctatccaaattacagatgcatagtttcattgccaggtctcttctgtctgcttcttcagacccaccctcccctctccccactgtttagttggcccaggaccctgtctggtaaggatacaactccaggccccttgccctatggcttctggttgtgttcagccgatggggagccccaaataagagaaggaagggacaccgtgagtgatatttatccctcagcttcctgcctgcactgtcctcttggtctggctgtgtccagtggtctcatgtcatagctgctcatacaggagtttctccttacaaattgcaatgttggcttctcttccccctccggcccagagtgattacagccatcaatgttgtgagctacaggttctataccctcccttctgcaggcccagaatggtaacagccctcaatgttgtgagctgcaggttctgtactctccctcctggggcccagagtggtcacagccctcaatgttgtgagctacaggttctatactctcctttctgcaggcccagagtggtgacagccctcaatgttgtgagctacagctctcaatgttgtgagctacaggttctataccctccattctgcagacccagaatgttacagccctcaatgttgtgatctgcaggttctgtactctccctcctggggcccagagtggtcacagccctcaatgttgtgagctacaggttctatattctcccttctgcaggcccagagtggtcacagccctcaatgttgtgagctacaggttctatattctcccttctgcaggcccagagtggtcacagccctcaatgttgtgagctacaggttctatattctcccttctgcaggcccagagtggtcacagccctcaatgttgtgagctacaggttctatattctcccttctgcaggcccagagtggtcacagccctcaatgttgtgagctacaggttctggagtctcccttctgggccccagagtggtcacaggcctcaatgttgtgagctgcagattctatactctcccttctggtttgcctacagccctctcacacatttgtaaatatagtcctgcaacccctaatgatgtcttgggcaaagatggaccttttatatgacgatagccccataagattataccatatttctactgtaccttttctgtgtctaaatatgttcagatacacaaatgccactgtgttgcaactgcttacagtattcagcacagtaccatgctgcacagatttatagcctaggaacaatagtctataccatataacctagatgtgtagttggctatgctatctaggtttgtctaagtatactctgatgttcatacaacaaaatagcctaacaatgaatttctcagaacacagcactgttcacagttgcaaagatatggaatcaacctaagtatccatcaacaaatgattggataaagaaaatgtggctaggtgtggtgctcacatctgtaatcccagcactttgggaggccaaggcgagaatccaggagtttgagatcagcctgggcaacatagtgagaccctatctctacaaaaaaaaggtttttttaattagccggtgtgtgatgacacatacctgtagtctcagctacttagggggacaggtgggaggattgcttgagcctgggaggttgaggctgcagtgagccatgattgcaccactggcactccaggctaggcaacacagcaagacccgtctcaaaaaaaaaaaaaagttacatatatatacacacagtatattcagccataaaaaagaatgaaatcgtgtttttgcagcaacatggatggaactggaggccattatcttaagagaaacaactcagaaacagtcaataccacatgttcttataagtgggagctattaataaaaaatgtgcacacattgacatatatataatgtggaatgatagtcattactgactgagaagggtggattgggtgtggggagttaaggaatgagaaattacttaatgggtataatgtatactattcaggtgatggatacactaaaagcccaaatttcaccactatgcaatatatctatctaacaaaactgcacttgtaccccttaaatttatttttttaaaaagcgtgtatcctaatttgaatgagctgtttcttgccagaaccctaactgatatgtcctttgtctagcaattctacttctggaaattttcccacacttaaactggcacatgtgcaaaatgaaagagatttccttgcagaagagactggaaataattcaaatgtctatagtaggggtactaattatataaataatggtgtgtctatagagtagaactgtatccagctatttaaaaaacaaggatagaaagatcttccaaacatatttttaagtggaaaaagcagggtggaacagggactatacatgctatctcttgtctaaaagatggggaaattaggaatatgtatttgtttttgcttatgcatgaagatactctgaaggattcacaaaagaaaaaaaagttttctaaagggagcaagacttttcacaattttttttttgaatgcttaaaattgttgaacccaacgactgttgcctgttcaaaagttaaatttaaaattcctcccagactaggtaggggattgggcccagaagctgagaccaggctcacttgaataaatggggtaaatgactaggaattttactattccttacaggtctctcattatcttgtctttgctcccatttttatatttgcagtttaattagacacttcagaattttgatcacctaatgttgatttcagatgtaaaagtcaagagaagactctaaaaatagcaaagatgcttttgagccagaatgccttcatcttcagatcacttaatttggttctcatgggtaagtgctgctttttatcttagctcttatagaagcaagctgtgatgccatcctcactgagagcactggcaggaagtcgcaaactcatttccctgactagaggacccagtaccaccctgcctagtgtcaggagttaagtggaaagcaaataggaaacctacactagtagtttagattcaatgtagattcctgtcctgttgttaattttaggaaaacaaatgagtgacttaaggcaataataatcaggactatcctcgccataatttgaagagtaatttctcctaacacgctttcttcctccccaatctttgataaatgtcttttacctctaaagttgattaattagcaacatgcttattcatattctgtgaatatttctaggatggacaattgcctctgaggacattccctcagccagcccaagtacttaaacaaaaacaaggaaattctttgatgttaaagatctcgtgtgtgtccgggcgcggtggctcgcgcctgtaatccctgcactttgggaggccgaggcaggtggatcatgaggtcaggagatcgagaccatcctggctaacatggtgaaaccccgtctctactaaaaaatacaaaaaattaggcgggcgtggtggcgggcgcctgtagtcccagctacttgggaggctgaggcaggagaatggcatgaacctgggaggcggagcttgcagtgagccgagatcgagccgctgcactccagcctgacagagcaagactctgtctcaaaaaaaaaaaaaaaaaaaatctcgtgtgcgtgtgtgtgtgtgtgtgtgtgtgtgtgtgtgtgtgtgtgtgtgtgttttgaggcatagtttcactctgttgcccaggctggagtgcagggtgtgagctcagctcactgcagcctccacctcctgggttcaagcgattctcctgccttagcctcccaagtagacgggattacaggcacccgccaccatgcccggctaatttttgtatttttagtagagacaaggtttcaccatgttggccatgctggtctcacattgctgacctcaagtgatccaccgccttggcctcccagaatgctggggttacaggtatgagccactgtgtccagccattttttttttttttagacagagtctccctctgtcacccaggctggaatgcagtgagcgatctcacctcactgcagcctccgcctcctgggttcgagctattctcctgccttagcctcccaagtagttgggactgcaggtgtgcaccaccacacccagctaattttttgtatttttagtagagacagggttttgccgtgttggccaggctgatctcgaatcctgaccttgtgtgatccacccacctcggcctcccaaagtgctgggattacagacgtgagccacgacgcccggccccagatatatttttaagtggaaaaagcagggcagaacagggaccgtacatattgttgttagtgtcagctcccaaatggatcttattttatctcagatcacagtccttgcaccatgtgctgctggcaccaatgtagagtaaaaaccatctatgtgggcatttttttggcacaagaaaaatctcaatctgataccaataaatgtgtgttaaagaatgtcagacttagagtaatcattgcaagttgagcccagataaaactattgcctctctaatgtgttttcttccttctagtgtatatcagcctcgtgtttggtatttcatatgattcgcctggtaagagatgttttttggcttcactaaattttgtataagagtgaaagtgttggggcaaccattcagaggtataaaatgtgggagatttgatttctgattgtacatctgttgcctgttttattgggattctttctctgtaaaaggagctaaaatgagctaactctggttttttgagagatacaaaactagtctaagaaatgaacactagagatcatttttaaacttctttaaagaatattcaaactcttaataatctcactaataaaagaatgaggagacacagactgtgccaaataaaaaatggcccagaaatatttactctttaatttacattcttccaccctgatgattccagacaaaggacaataatttttttttaactaaacttcttcctacgtatataaatctgtccacaaaacttcactaagtattaaatatgtgtccaaccttgtgctaagtgttggttgggggtgaagagttggcagttgagaaacaaaggcctgagtcctaaccacaggaaacttcagtgatctttaaaaatttaaccgtataaggcagaatttggcaagtctggctttaatgtctcatttatcactgccacttcccacctacatgacattgtataattcaactcagtttcacagtctgtaaaatgaatcttttcatagtgcctacttcagcattgttgtggggcttaaatgcttagaaagggccagtctgggctcatgttatactcccctgctctctgtgatccagggaataagtgagctggggaatccagaggaaggaaaatttgcagcgggctgagctacttaaggaggacttcatggaggagctgggagcagagttgagagaacggcttggggagggagaatgggtaggggagagtgaaaggaagtgcatcatgtgggctgggatggcctgggttattttggtccagtgaaccatggagggacagtccaagggcatcggagaagcccttctgtccagactctccttacacagtgcacagtccctgtttcccatgcttgcctgccctgacaatatgttgctcgttaattgacttactaatttatttcccatgtcctgtagacttcctgttttcaagacaccagggctctctggagaggttatctgccagaggtgtgggttctagatcccaagaaatgactgaacagtggccagaatacaactgtgggttccaaatttcaatgccctttttcttcttctctttagattacacagatgaatcttgcactttcaagatatcattgcgaaatttccggtccatcttatcatgggaattaaaaaaccactccattgtaccaactcactatacattgctgtatacaatcatgaggttggtttgatatttcattttctcttggtaaacatattattgttctgttatatggggagaggtgatcttttctctctctctgtctctccctctcccttttcctatctacctctccttctctctgcgtttcttattcagagccttaaaaagccaaagacaaaacaccatcacacatccatttttaattcagttgaatactttaataatccaaatctattttgacaaagcttgtatgtgtcatcaaagccaatttctacaggtcagaacctcacatacaaaataattcttgtgtatgggttaggcaatgatttctctaattcagtcagtctgaatgtttaaaagtcctgttatctgaggacaggaatccaaaggtctattgaccatattgatggtttatgttcacttttctttactctggtgggacaccagaaagctgcctggcctagtctgggacaggcctgggtccatagtctggtttggtcactaaccagcttgacacttggcacggacctcagcccctaagctaatgcctctgctgaggggttgctgcaaggattcgtgacataatggatggagtcctgcttgtcttttgtcttcccacacctaccaatcgcccttagaagtcattgctttgatccagcagccccttggagtgtccttttgatggttatttatttggcctagagctgctgctgctactgcttattgactgagccagtgggagacctcttgtgagtttctcttcggtgcctgctaaaaagtttttctctgcattgagtggtcacatgtatcatccaactaactgaagcttggtagatgagatatctgcattgtccctgaaatagcccaggtctgacttaggactggatcatctagtcttagccagagagggagggggtctcagggaaggcattcataattgtcccatagaggaagggagatctgaggcttccaccatgagggcccaagtttcattcattcatttactcatccggcaattttttttttttttttgagacggagtctcactgtgtcaccaaggctggagtgcactggtacgatcttggctcactgcaagctccacctcccgggttcacgccattctcctgcctcagcctcccaagtagctgggactacaggcgcccgccaccacgcccagctaattttttgtatttttagtagagacggggtttcaccatgttagccaggatggtctcaatctcctgacctcgtgatccgcccgccttggcctcccaaagtgctgggattacagacgtgagccactgcacccggctcctccggcaagttttactgagcacctactacatgccagggggtccaactgtgaaccaaagtccctgccctcctggagcagacattatgtaaatggagacatcagtaaacaaaggtataatgtgacaggtgtgggtaaatgctacaatcaagaaaagagagggattgaaagtgcaggggtggggagggcataagatgttccattttcaataagatggttggggaagatcacttaatacaatgatatttgggcagagccctaaaggaaacaatgaagtaaggcgcccaaaaatagactctcattacatcaatgctaacaatttcctttttccatttttttctttccaaagtaaaccagaagatttgaaggtggttaagaactgtgcaaataccacaagatcattttgtgacctcacagatgagtggagaagcacacacgaggcctatgtcaccgtcctagaaggattcagcgggaacacaacgttgttcagttgctcacacaatttctggctggccatagacagtgagttttatctctgtttctccacttcgtccccatcatcaagatctttattatttgctattccatgaaataggaggtctacaaaggtgttttagacctggggctgggctcacctcttggccctgccacttcctagctctgtaaccgtggactgctttgcttctctgagccttggttttctaaatctgaaaagtggaatgataatttgtactttgcagatttgccccgtgcctgtataaggcagtaggaactgctgttttcggttttgcagcctgacaggaagtctggagccaggttcaggtgggctggatctagcgctctcatctctctggcccaggattttctttctttctttctttctttctttttttttttttttgagatggagtttcactctgtcacctaggctagagtgcagtggtgcgatcttcgctcactgcaacctccaccttccaggttcaagcgattctcccacctcagcctccagagtagctgggattacaagcacacaccaccatacctggctcattttttgtacttttagtagaaatgtttcaccatgttggccaggctagtctcgaactcctgacctcaagtgatccacccgcctcagcctgccaaggtgctgaggttacaagcatgagccaccacacctggccccagtgttttcttaatacagcaactccaccccctcattataacccaatgttcttttgtgtgtgaacaccaagtgtgcatgcacctagtacccaaagctcagaggagaagactagaccccaagaacaggcctaccccttctttctttccctgtgactcaagtcagttccctaacacactgtgttaacagccccagctgtgttactttttcaatttcccactttacaacgagtttccaagagaaccatctggtctcagcttcctgttgtaggctatgcgggtgtgcacgtgctcatacatgattagcaaagtggtaaggataactgaatccccctgtggcaaacaattcggatacgacatttgctggatttgtgtgcatgtttacgtatgtgtataaacagacatctgtgtgtacacacagaaaagaaagaaaatcagaatttatagttcatggtatttgggttgttaaagaatgcatattaaagtaacagtgagatatgtttcatggctcaaatgataaatatgaaaaatacataaatatccaggtttagagggaatacaaagagtgtgctttggcatggtccatctgaagtaattggcagcatgtattaaaaaccttaacatgtgcttactctaatccagaattctttagtaatttgtcccaaagaaattattaaggccaggcacagtggctcacacctgtaatcccagcactttgggaggcctagaccagtgtatcacttgagctcaggagttcaagaccagcccgagcaacatggggaaaccctatgtctacattaaaaaagaaagagagaaagaaagaaagttaggggggagggagggagggggggagagagagagagagaaagagaaaagaaagaaagaaattattaaggacaaatgcaaaaatttagttccaagaatatcccatgatacattaagtctttaataaaaatcagagacaatttaaatgttcaaaacagtgaatcagttaaatcatgatacagtcacttagtggaatagcattagcaatgaaaaattatgatgtaaatcaggacttggcagattttctatacagggccagagaagaaccactttagactttgtgggccacatatggtctctgtgacatattcctgtctgtttttgttttttgcacagtgtcttttgaaccaccagagtttgagattgttggttttaccaaccacattaatgtgatggtgaaatttccatctattgttgaggaagaattacagtttgatttatctctcgtcattgaagaacagtcagagggaattgttaagaaggtaagtggcttctcctgttaggatcaaaacagttctgagtgggcaatcaatgcacttgactgtctcttttgaaaggaaatttgcagttgaacaattaaagctaaaacgtcaggcttcagtatggtccgacttagggaagaagtcactatggttcattcactattgatctaaacctgcagcacagtgttctttaaaagaataagccacggctgggcctggtggctcacgcctataatcccagcactttgggaggccgaggcgggcagatcatctaaggtcaggagtttgagaccagcctggccaatatggtgaaaccccatctctactaaaaatacaaacattagctggatgtggtggcaggcatctgtaatcctagctactccggaggctgaggcaggataatcgcttgaacctaggaggcagaggttgcagtgagccgagatcgcaccattgtgttccagcctgggtgacagagcaagactccgtctcaaaaaaaaaaaaaaaaaaaaagagtaagccacatgcacaacatcaaggaacacacaggagagagggtgtgggagggagatgcagagtacagccaaatttcagtgaaccctggagagatttatttgaaaaggagagtttagctgagccacccgtgaaaagcatctgtcgctgcctctctggccctcacacacagtaaggaagtggcttatctggcaggttctgtcctctcctaatttctgcaaaggacctgactctcagtaacctcagggttatctggtatcagacagccctgcatcttcaatttttgttgtccctagccctccaaatgctggaataagtggaaatggacaaattgctctcaccggtgtagcagcagcttatgtctgtagagccctttgccaagtataaaacccttgcaagtgagaccagcctgagagataatcagggtagatgcatttcaggcggagggcacaggaagttcaaaggctctgaggctggagtgggcccggtgtatttcagcaacagcgaggagaggtggctgaactggagtgaccaggcaggagatgaagaggaggtgaggtcagagggtaaatgtggctggacctggtaggagtttgtgggtctgggtcttctgagtgtgatggaagcctgtggaacccaaggcttaacagagcatcctggctgggctgttaaaaatagaccacaggggcaaagatgggagttaggagaccaactaagacacaatccagggtggcagtcacttaagaggcagtaacaaattatatgattattatcatttttcttttaatatcgacatggattataatcagtactctaggaaaaggagcaaaaatgggtgaaaaataagtttatgtggcctaaggactatgtggagtgtcattaaatctgtttcaatcatgtctcgtttgtgttcaccccataagcaactaactctatgttttagattatgattcctaaaataagagactgttgcttattaggatattgactactctataagaggaaaaactgtagttaataggcatcttcttcataaggaaaattagcctttaaatccagaaaaaaaaataagctactagtataatctaagcaacagatggtggtggcttggaccttgatagtagaggggtaatgagtagtgagaggccatcaaattctgcatatattttgggttttgtttgtttgtttttgagatggagttttgctcttgttgcccaggctggactgaaatggcatgatcttggctcactgcaacctccgcctcccgggttcaagccattctcctgcctcagcctccctagtagctgggattacaggcacccgccagcacacccagataattttttgtatttttagtagagacagggtttcactgtgttggccaggctggtgttgaactcctgacctcaggcgatccacccacctcagcctcccaaagtgttgggattacaagcatgagccaccatgcccagctcataattctgcatatattttgcatgtggagcaagactaacttccccattaactatggaagatgatgaatgaagcaggtgagggttagatagggttagagggtttgggacatgttaaattccaggtgtccgtaaggaatctaggaggagacgtggggaaggagctggatgtgccagtctgttgtccaggagagaacccgcagctagagagagagcctgggagtcactggcttcttggtgcatgttgaatgccctaagaccagatgaggtcacctgggaatagacactcagagagaaaacaagacatccagtgacagagcccaggaacattccaaaatttggagatctggcaaatgaggaagaaacagcaaaatcgactgagaaagagcaaccagcatggtagggagagaagcaggtgagagtgatgtcccggtagctgagagaagaactttccagaaggtgaaagtggtctactgagtccagtgctgtaaatgggacaattgaagaggactgactattggatttagcaacattgtgtccttgataaaagtagttttaatagagttaggggcaaagagctggttggagtagattcaagaaagagtgggaggagaaaaattggagacagtgaagagagctcattcttccaaggaatttttccaaacagggaaggagattgtgtgctggccactggaggggaagcttttagtttgttgggtcgtaagtttgtttgtttactaactcctcctcccaaacagaaatttacagaaaaacatcattactgaaggctgtatttgagctgctaggaatcctcatttattaaactgctagtaagaatgtattttaaaaactgtaaaacatgatacaaaagttattattcatgaaagagccttcatatcatcttttaaattctgaagtgaaatgcaactacaggaaagaagaggcaaggtgtttaaagggagatggctgggcacagtggcttacgcctgtaatcccagcactttggaaggccaaggcaggcagatcgcttgcggtcaggagttcaagaccagcgtggccaacatggtgaaaccccatctctactaaaaatacaaaaattagccaggcatggtggcgggcatctgtaatcccagctactcaggagactgaggcaagagaatctcttgaacccaggaggtggaggttgcagtgagccaagatcatgccactgcactccagcctgggcaacagagtgagaccccatccatctatctatctatctatctatctatctatctatctatatctgtctattgataaagggagaagatgagaaactagacatcagtcagttttgtcacagacaagctctgtgaccttggagaagttacttagccacactgagctacagttttctcatccgttgaatggaggtaatgcctattttgcagactgttttgaaagtcaaaagggttaatgtttatgaaggcactttctcaagtgtaaagtagacacacactgtccatgagagaagataatcttgtaaaaatgacgtcacagagacttttattcctctttgaagacttttatctcatttgtaaaatgaaggcgctagactagatgtcatggttataaaatatgtgtgtgtgcaggtgtatattaaaagtgcatgtaggtgtagttttctgataaattacttgctccagatgacttataaatcctttttcttaccaagcctgtgataaatctaaccctgtttgagatttgaagacaaatcccaaaagagattaaggcctacctctaaatgaaattctcagtcttactgattttttgcttatgtttacagcataaacccgaaataaaaggaaacatgagtggaaatttcacctatatcattgacaagttaattccaaacacgaactactgtgtatctgtttatttagagcacagtgatgagcaagcagtaataaagtctcccttaaaatgcaccctccttccacctggccaggaatcaggtatgttcatttttttaaattcatgttttgagtattcatgcttttactctgagggcaagcctatttaaagaaaagaatctgaaaagaattcatggagcactaaaggtctttcttccagtaaacacctcacagagatgttttctgttggttcgtgtgtatgatctggtagagtcacttttatattgtcataccaaaaaacaatcagatactactcgatgagatcagaaatcttgaaatggaaacgcttttgtttcagggagtcaggattaaattcagcactgtgtgccctttgtgtggccattgctgaagccaaatgccagaagaggtggagttgcttgagacagtggtatacagtggcattaaggggtgaaaaggtggaagcagcgaggttgggtgcagttcatggatgtgatctggcatcagctctcgctcatagatgaaaggaacccttgccagggtgtacgagaaaatcactgatgaaggctgaacacctttctgttacacagacatcagaacaataaacagtgtgatcccaaaccttcttcccctttggagtgagaacaatcaagcctcggaactccctgctgattgttttctcaggaagtagccaagtttccacctgttttaccaaaagtgagaagctatgcaagtctccctcaaagaagcccttctaaatgtcccaaccgcagtgttaggggaaagaggtcccaatccataccccaagagagggttcttggatcttgcgcaagaaagaattcagagcgagtccgtaaagtgaaagcaagtttattaggaaagtaaaggagtaaagaatgactactctatagacagagcagccccgagggctgctggttgcccatttttatgattatttcttgatgatatgctaaacaaggggtggattattcatgcctcccctttttagaccatgtagggtaacttcctcacattgccatggcatttgtaaactcatggtgctggtgagagtgtggcagtgaggacgaccatcttggttttggtgggttttggccggctttactgccatctgttttatcagcaaggtctttaccaacggtatcttgtgccaaccccctatctcatcctgtaagttacaatgcctagactgtctgggaatgcagcccagtaggtcccagccccattttacccagctcaagatggagttgctctggctcaaatgcctctgacaccaatggaagtatctttaatgttctgatttaccagaataaaaataaggtaggatctataaagaaattactttagttgtaaaccaaaataaaattctaagccccccaaccaactgaatggatccctcctctcagccaagggccgagtaaagtaaagtaaacctgaaacactagttcaggccatgatgggagtgagtggtccagacgtgcctcacgggaccttcctacctttggaattcaggcacagctggccagcactaatattaaaacagaaaccttaagactgacaaaaagatgctttgtagcactaataccagcatgatggatagcaggccctaaaagaaaccaaagtgttttaccccaaaatacatttctttgacatattttgaaatggccctgcaaagctgtctcttgcagggaaaatctgctttctataaagaacccccttcccagtccaggtgttcttcctgatccaagagagaattcactaagagtctggcacttttttaagtccagtaagaaacatttacagtctgttctctctgaagcctgctaccagaggcttcatctgcgtaataggaaccgtggcctccgcaaccctttgtcttaacccagatgcttccttttattaattccaagtttttaatcagaaaatctttgaatctacctatgacctggaagcccccccacttcgaattgtcccacctttccagattgaaccagtgtacatcttacatgcattgattgatgccttatgtctccctaaaatgtataaaaccaagctgcaccctgaccaagggttctcgggatctcctggggctgtgtcatgggccattggtcactcatatttgactcagactgaatctcttcaagtatgttactgactttggctcttttcattgacaaagtgatatggtcacttgtgaatgaagtgagccacggaacgttgcctggcacataacggtgctctgtgttggcttcactacagggcaatatgatttgattctctagtgttcctcaagaccagatgatgcacaggctggttctaaaggaaaaaacatgtcaaacacctttagcgtaagttatttttatgtcagcaaatacaggcaaacttaaaactgcatatagattctgactatagctctttcaaaaatataaatccaaaataaatgtgcatgtctttgttctaacaccagctatctgacactaactagttgtccaatgattccattcatttctgatactaccccaggttagcacagaccccacaggttaaaggctcagtcccacaaaactgcctgcccccacttcagatgccagccacaagtcatgggtgacaaggttccctgcacttccacctgacttggctacaaattcaggagttcccatgacctccctttaggtttgataatttgctaaaatgactcacagaactcaggaaagtgttatggcttatgattaccattttattataaaggaattgatggacagccattgaagaggtgcacaggacaaggtctgaaagggtcccaagtgcaggagcttctgtccctggggagtcaggtgtaccaccctctctgtacattcatctgttcatgaatttggggactccccaacccttggtgttcacagtttgtattgggtttcattatgtatgtgtgattgattaaattactggctgcaggattgaactcagtctccagcccactcccctccttggatagaggtcaaatgggggagctggaagttccaaccgtctgatcatgtggttagtttttctagggaccagccctcatcctgaagctatccacaccctgccccatcacctcacaagcataaactcatatgtggcccctaaaagaggcttgttaacaaaagacactcctaacgttcaggaaattccacaggtttttgaagctctgctccaggaactagggacaaagactggatatatatgtatattttattatatcattgatcttacatacaaacgaaactcttatagacaataaaaactgaaattagtgacctggcagacagatggtggtttattgaaactcagtccccagttccaaggtgaatgtgttgctgatgagaaggcacaagctccttggaggttgatgaattctgtgatgactcactttctcccctgactcttttccatttcacctactaagatgttcatgtaacaacatcctctcaggtcattccatttttacttggcgtgaatgcgtcatgttgcacatcaagtcagccctcattctttgattattacccgagataggtcaagtaccgctctctttaattatccaaatactgtacctgatgtcaaattcttgtttgaaactcaggaagcaaataggttcagataacgtggcctctgtcactatctgcttgccatctgacgtgccctcaaccagccaaactcagaaaccagacaggtttggatggtgaggggtcttggaaggatagcctgagaccagcattaacataggctcagcagtaagcactgtgacccaatcctagggcagactgatatggggggattttagcccagacatctggagaaacaccttccccttgtcaagccttaaaactaatggtttgtctcttttattaatattaaggccctaaggaaaagctctattcattcatttgacaaatgtttattgggggcctgttatgagccagattcttttctggatattgaggatttagcagtgaacaaaacagattaaaaacttctcaccttgtggagcttacattgcagtaggagacagaataacaagatcaacatgtaaaatagacagtatgttaagtaagtaccatggaaaaaaattatgcgggaaaggaggtgagggggatgtcaggttgaggagagcaggttgctgtttttaataggatagtgtcttgatttgcatttgctagaagcagagcctgggatgtgaattcatattcaagtgtgatttattggtgggggcatcttaggagaaggggaaagagggaacaggtaggtacagggagagagaaattaagcaggcatgtggctctcagctgagcctgatcccaaggggttctcggaagcgtgaactgtatcctcaagtcagcagccagtcagttactggtggtgatctatggcatggcctccagatgaggcagcccccttttgggcaagggcagttccttatgtgtccggagttggttcctgccaatgggttcgtggtctcgctgacttcaagaatggagccgcagaccttcctggtgagcgttaacagctcttaaagatggcacagacccaaagagtgagcagtagcatggtttattgtgaagagcgaaaggacaaagctttcacaccctggaaggggacctgagcgggttgccactgctggctggaggtggccagcttttattcccttattgtcccttcccgtgttcgtttctgtcctatcagagtgcccttttttcagtcctcctcgtgattggctacttttaggatcctgctgattggtgcattttacagagcgctgattggtgcgttttagagtgctgattggtgcgttttacagaatgctgacttgtgcattttacaatcctcttgtgagacaggaaagtccctgattggtgcgttttacaatcctcttgtaagacaagaaagttccctaagtcctcactccacccaggaagtccagctggcctcacctttcacttagagaaggatcagctctgagagatatcagcagacacgtgcggcagcagtagtgggtgtgcactgactggaaaaggggacatgggcaggccacccacagcatccaccacagatggccacagatggccttcctgagaaggtagcatttgaataaagacccaagggagatgtggtaagcagaataatggcccccaaagatgtctacatcctaatcccagatatgtgaacaggctaacctctatgccaaaggggcttgtgggtgtgatgaaattgaagatcttggccaggcgcagtggctcatgcctgtaattccagcactttggggggccgagccaggtgaatcacctgaggtcaggagttcgagttcagcctagccaacgtggtaaaaccccatctctactaaaaatacaaaaattagccaggcgtggtggcatgcgtctggagtcccagctacttgggaggctgaggcaggagaatctcttgaacccgggaggtgggggttgcagtgagccaagatggtaccactgtactccagcctgagctacagagcaagactgtgtctcaacaaaaagagaagcaggagactcagaggcagagaaggagctctcacagcagcagcagaggtcgcagagtgaggatgaaggagggggccatgagcaaaggaatgcaagtggcctctagaagctgggaaaggcaaagaaatgggttttcccctagagcctccataaggagttcagtcctgccaacatcttgatattttttatcccagtgaaacccattttggatttctgatctccagaactattaatataatatatttatattgttttatgacactaactttgcatcatttgttacggtggcaatgggaaacaaacacaaggtgagggagtgagtcacgcaaacctatcaggggaaggagttccatatgcggggttcagcaagtgccaagtgcccgaggcaggatatgcctggcacggcacggcaggagtgaactgaacaagggaagaatagtaacagttctggtcagaaaagatggaggagcctgaatgacatagaacttagaagccgttgcaagagatggggaccctcagagggttgtgagcaggttgctctccgtgatctgacgtgggatgtaaagggaacatccatccacatgccttgaagtgggagccaggtgacccctgggctgattactgcagtcacccaggggagaggcggtcttacttgttccagagaggtaagtacgggaggaactataagagactgatgttagtcatcgccagtcttttcataaagttctttatcttttccattaaagatcattgtgatcagatattaccaaccccgttgctcagttcagccctctgcttgtgaggtttcttattttttgcttaaaatatctccacagtgaatccagagacagacaggtttgtccaaggccaaatttttaagacacgacctggtctctccttcccaagatgggttgatctggtccatctttcatgaagaagatagttaacagcagtaacattcaatcacagcttctcctttctgagtcagaacattgatgggattcatctcttttcaaatatgaatatttaaaaatagcatgcatgtataattgtcatgaccccaagtgagatttctattttttagattatcatcaagctgaaaacaaacaaaaattctaagttctcctaaagaattctcagactcatgagaataccccaaattgaggaatattatcctagcatattaactacaatttacacaatttggtttggacatagagtgcattgtagctgttatatgcaagttggatgggtacatgagtcacaatctctgtattatgccattccttcaccagtgaaatcactttggtttacagtacccctttcaagaatgtaaacgctatacatgtcagaattttgtatcctaaaggcgtgcctctgtggctagatctgattctggaactgtcattgatatgacaatccaatccttcacactcttgatggaggtgagagtggattcttgaaccctgtgctatctaacagtgtttttactgaactatcaagggtttttactgaacttctttctattcattccttaaccttctggaagacttagagtacataatccatttgatttccttttttctcccctctatctatttttgcctgaggctatagttcgaggattaatactaatgaagacctttctggaagtgcaagagagccttagtgatataactactgatttttcagtctggtcgcacttcaggaaaataactatggtcagtcaaaaagctgaaattttccaaaaggaattttgatgagaaactaaggggaactgttaatagagcaaggcaggttctgcagagccctgacttgtggccccagcgtggctaaagtccagcctcagaatgacccagttggttgttttcaagcaaactttccttccccacttcttcctgcccgcagcgcatgctaaccagtgtggctaccgaacgtttgagatgtgtttcatgtgactgagagaccgagctcttaattctgtttaattttaatcatttaaattcagccagctgcagccagtggctactccactgtacagtgcagttatagaacataaactgaaggaaattttacttttaaaagctaagtctattttattgtttaaaaaatgcacacttagataattctccagtctctggtatttctcaatataaaactgttttttcaaacctttggtttcttgatcatcttgtaacaccaggccaatgtacatttatttccatctgcaattgtttattgcattttttgaaataaagtcatttaatttttcatcaacagaatcagcagaatctgccaaaataggaggaataattactgtgtttttgatagcattggtcttgacaagcaccatagtgacactgaaatggattggttatatatgcttaagaaatagcctccccaaagtcttggtaggtagtttttttgttttgttttgttttttctatctttgttttttattttaacttaagaatttgtatttatataaatattttcacagaagaaaatctcattttctataaacaccaaaatgctttctcactctgagttcttttccatatctataaatgtatattttgcagggtttttgttttgtttttgtttttattatacttttaagttttagggtacatgtgcacagtgtgcaggttagttacatatatatacatgtgcagttgtaagtgtatctgtgcatctgtgcattttatgttttctttcctttttttttttttttttttttgagacagtctcactctgtcacccaggctggagtacagtggcgtgatctcagctgactgtaacctctgcctcctaggctcaagcaattctcgtgcctcagcctctcaagtagctgggactacaggcgtgtgctaccacacctggctaatttttgcatttttagtagagatggggttttgctatgttggccaggctggtcttgaactcctgacttcaagtgatccacctgccttggcctcccaaagttctgggattacaggtgtgagccactgcactcagcaatgttttgttttgttttgtttttatacttcatcacataatttataatgatcaggtagaatttcattattattaacataccatttttcatttaaccatttctcagctaaagggcatttggatttcttttccttttcttttctttggtgatgatgaatagtacaataaacatttttatatggatcgtctttttgttttggattatgtcagtggaacatatacacaaagtggatttatcctataaaaagatttaaaaaggactaggcacagtggctcacgcctgtaatctcagcactttgggaggctgaggcgggtggatcatttgagcccaggagtttgagaccagcctgggcaatataaggaaaccttgtcttagagaaaataaaaataaattagccaggcatgctggcacatgcctgtggtctcagctactcaggaggatgtggtgagaggattgcttgagcccaggaggtggaggctgcagtgagctgtgattgcgccactgcactccagcctcggttacagagtgagaccctagctctaaaaatatataaatatcttaaaaatataaagaagcagccaaaggagaggaagttaagaggagtaagtcagaacatagtctatgtggccagcagcctgcctggtttgaaaggcagctgctcccactcactagtcacaaaccttgagcaagtttcttaacttctgcacctcattttctcatctgtaaagtgggcataagaatagtaagcctggccaggcgcggtggccacgcctataaacccagcacttcgggaggccaaggcaggtagatcacgaggtcgggagttcaagaccagcctggccaacatggtgaaaccccttctctactaaaaatacaaaaatttgccgggcatagtggcgggcgcctgtaatcccagctactcaggaggctgaggcagagaattgcttgaacctgggaggtggaggttgcagtgagccaagaccgcactactgcactccagcctgggcaacagagcgagactcccgtctcaaaaaaaaaaaaaaaaaaaaatagtaagcatacctcatagagcagttgcaagggaaaggtaaattatatataaagcaccaagagtcatgcccagcatatagtaagcatggtgtaactgttagctgttattattgctgtcatcatcatcaactgcatcatcattcaatctcattaagtttattttttatttttttagaggcaaggtctcgctaagggctggaatgcagtggctattcacaggtgcagtcataatgcactacagtctgaaactcctgagctcaaacagtcgtcctgcctaagcttccccagtagctgggattacaagcgtgcatccctgtgccccagtgattaagttttattatgtagaaaataaagagcaaacagtacagctgatacggactctctctctctttttttttttttttaagaattttcataactttttagcctggccatttcctaacctgccaccgttggaagccatggatatggtggaggtcatttacatcaacagaaagaagaaagtgtgggattataattatgatgatgaaagtgatagcgatactgaggcagcgcccaggacaagtggcggtggctataccatgcatggactgactgtcaggcctctgggtcaggcctctgccacctctacagaatcccagttgatagacccggagtccgaggaggagcctgacctgcctgaggttgatgtggagctccccacgatgccaaaggacagccctcagcagttggaactcttgagtgggccctgtgagaggagaaagagtccactccaggacccttttcccgaagaggactacagctccacggaggggtctgggggcagaattaccttcaatgtggacttaaactctgtgtttttgagagttcttgatgacgaggacagtgacgacttagaagcccctctgatgctatcgtctcatctggaagagatggttgacccagaggatcctgataatgtgcaatcaaaccatttgctggccagcggggaagggacacagccaacctttcccagcccctcttcagagggcctgtggtccgaagatgctccatctgatcaaagtgacacttctgagtcagatgttgaccttggggatggttatataatgagatgactccaaaactattgaatgaacttggacagacaagcacctacagggttctttgtctctgcatcctaacttgctgccttatcgtctgcaagtgttctccaagggaaggaggaggaaactgtggtgttcctttcttccaggtgacatcacctatgcacattcccagtatggggaccatagtatcattcagtgcattgtttacatattcaaagtggtgcactttgaaggaagcacatgtgcacctttcctttacactaatgcacttaggatgtttctgcatcatgtctaccagggagcagggttccccacagtttcagaggtggtccaggaccctatgatatttctcttctttcgttcttttttttttttttttttgagacagagtctcgttctgtcgcccaagctggagcgcaatggtgtgatcttggctcactgcaacatccgcctcccaggttcaagtgattctcctgcctcagcctccctcgcaagtagctgggattacaggcgcctgccaccatgcctagcaaatttttgtatttttagtagagacaggattttaccatgttggccaggctggtctcaaactcctgacctcaagtgatctgccctcctcagcctcgtaaagtgctgggattacaggggtgagccgctgtgcctggctggccctgtgatatttctgtgaaataaattgggccagggtgggagcagggaaagaaaaggaaaatagtagcaagagctgcaaagcaggcaggaagggaggaggagagccaggtgagcagtggagagaaggggggccctgcacaaggaaacagggaagagccatcgaagtttcagtcggtgagccttgggcacctcacccatgtcacatcctgtctcctgcaattggaattccaccttgtccagccctccccagttaaagtggggaagacagactttaggatcacgtgtgtgactaatacagaaaggaaacatggcgtcggggagagggataaaacctgaatgccatattttaagtt

SEQ ID NO: 2 - DNA, 4306 bp, Homo sapiens
  source 1..4306: mol_type = genomic DNA
gtatcgctcctcgtaggccggggctcggcgcgcgcacccgcactaaagacgcttcttcccggcgggtaggaatcccgccggcgagccgaacagttccccgagcgcagcccgcggaccaccacccggccgcacgggccgcttttgtcccccgcccgccgcttctgtccgagaggccgcccgcgaggcgcatcctgaccgcgagcgtcgggtcccagagccgggcgcggctggggcccgaggctagcatctctcgggagccgcaaggcgagagctgcaaagtttaattagacacttcagaattttgatcacctaatgttgatttcagatgtaaaagtcaagagaagactctaaaaatagcaaagatgcttttgagccagaatgccttcatcttcagatcacttaatttggttctcatggtgtatatcagcctcgtgtttggtatttcatatgattcgcctgattacacagatgaatcttgcactttcaagatatcattgcgaaatttccggtccatcttatcatgggaattaaaaaaccactccattgtaccaactcactatacattgctgtatacaatcatgagtaaaccagaagatttgaaggtggttaagaactgtgcaaataccacaagatcattttgtgacctcacagatgagtggagaagcacacacgaggcctatgtcaccgtcctagaaggattcagcgggaacacaacgttgttcagttgctcacacaatttctggctggccatagacatgtcttttgaaccaccagagtttgagattgttggttttaccaaccacattaatgtgatggtgaaatttccatctattgttgaggaagaattacagtttgatttatctctcgtcattgaagaacagtcagagggaattgttaagaagcataaacccgaaataaaaggaaacatgagtggaaatttcacctatatcattgacaagttaattccaaacacgaactactgtgtatctgtttatttagagcacagtgatgagcaagcagtaataaagtctcccttaaaatgcaccctccttccacctggccaggaatcagaatcagcagaatctgccaaaataggaggaataattactgtgtttttgatagcattggtcttgacaagcaccatagtgacactgaaatggattggttatatatgcttaagaaatagcctccccaaagtcttgaggcaaggtctcgctaagggctggaatgcagtggctattcacaggtgcagtcataatgcactacagtctgaaactcctgagctcaaacagtcgtcctgcctaagcttccccagtagctgggattacaagcgtgcatccctgtgccccagtgattaagttttattatgtagaaaataaagagcaaacagtacagctgatacggactctctctctctttttttttttttttaagaattttcataactttttagcctggccatttcctaacctgccaccgttggaagccatggatatggtggaggtcatttacatcaacagaaagaagaaagtgtgggattataattatgatgatgaaagtgatagcgatactgaggcagcgcccaggacaagtggcggtggctataccatgcatggactgactgtcaggcctctgggtcaggcctctgccacctctacagaatcccagttgatagacccggagtccgaggaggagcctgacctgcctgaggttgatgtggagctccccacgatgccaaaggacagccctcagcagttggaactcttgagtgggccctgtgagaggagaaagagtccactccaggacccttttcccgaagaggactacagctccacggaggggtctgggggcagaattaccttcaatgtggacttaaactctgtgtttttgagagttcttgatgacgaggacagtgacgacttagaagcccctctgatgctatcgtctcatctggaagagatggttgacccagaggatcctgataatgtgcaatcaaaccatttgctggccagcggggaagggacacagccaacctttcccagcccctcttcagagggcctgtggtccgaagatgctccatctgatcaaagtgacacttctgagtcagatgttgaccttggggatggttatataatgagatgactccaaaactattgaatgaacttggacagacaagcacctacagggttctttgtctctgcatcctaacttgctgccttatcgtctgcaagtgttctccaagggaaggaggaggaaactgtggtgttcctttcttccaggtgacatcacctatgcacattcccagtatggggaccatagtatcattcagtgcattgtttacatattcaaagtggtgcactttgaaggaagcacatgtgcacctttcctttacactaatgcacttaggatgtttctgcatcatgtctaccagggagcagggttccccacagtttcagaggtggtccaggaccctatgatatttctcttctttcgttcttttttttttttttttttgagacagagtctcgttctgtcgcccaagctggagcgcaatggtgtgatcttggctcactgcaacatccgcctcccaggttcaagtgattctcctgcctcagcctccctcgcaagtagctgggattacaggcgcctgccaccatgcctagcaaatttttgtatttttagtagagacaggattttaccatgttggccaggctggtctcaaactcctgacctcaagtgatctgccctcctcagcctcgtaaagtgctgggattacaggggtgagccgctgtgcctggctggccctgtgatatttctgtgaaataaattgggccagggtgggagcagggaaagaaaaggaaaatagtagcaagagctgcaaagcaggcaggaagggaggaggagagccaggtgagcagtggagagaaggggggccctgcacaaggaaacagggaagagccatcgaagtttcagtcggtgagccttgggcacctcacccatgtcacatcctgtctcctgcaattggaattccaccttgtccagccctccccagttaaagtggggaagacagactttaggatcacgtgtgtgactaatacagaaaggaaacatggcgtcggggagagggataaaacctgaatgccatattttaagttaaaaaaaaaaaaagcaaacacaaagatgcttcaagatcttcaggagaagtatggtatacaagtttcagggaccctatttgacaattttcagagtgctctctatgctgattccgagtcgagtgtgtcagctgtgattacagtgcctgtggatctaggccgggttgggggggtgtgggcgggggaagggaagtctggcccggagcaattgctcctgccggtaaccccagcactttgggatgcctaaacaggcgtatcgcttgaggccagtaattcgagaccagcctgggcaacatggcaaatctgtctctacaaaacaaaattagaaaaattaactgggcgtagtggcatgtgcctgttgtcccagctacttgggaggctgaggtgggagaatggcttgagcccaggaagcggaggttgcagtgagccaagatcatgtcactgcacttcagcctgggtgacagaaccagaccctgtctttaaaaagggagttggtggggagaggttctagaatgtcatgtagcaaccagtttaaggactgggactcagggatccaactcccacagtttccctgtgtgaccctaggcatttgacttagcctttctgagcctcaggttttttgtttctgaagtaaaaggattggactaggtaatctccaagatcctaggaacccaggagaaagatgagaaaatgtacaagaatgaacactcaggtggaaatgctgcaatcctgagaagctcccaggatgaatgaaaggcacaggacctcttacccctcacccctgcccccctcaagagctggtttctcaaacctttctcttaggccccttcaaagggggaaaactaaaaattatacaagttatagttcaaggactttaaatagattatttatatgattgctcataaggatgaggctgtgaggagggaacaccttatttaatctaatgaaattccataggaaagaggccttttgtatattgaatcaatttatctgccttctcagtgcatctgtcatattctgaaagattctgggttgatcttttgcgataacctctatggctgtgagtgtgtgtgtgtgtttgtgtattttttaacattttgtataatgattggaggttggtaaaaagtaacacaacagtacttttttaatacaaa

SEQ ID NO: 3 - DNA, 4260 bp, Homo sapiens
  source 1..4260: mol_type = genomic DNA
gtatcgctcctcgtaggccggggctcggcgcgcgcacccgcactaaagacgcttcttcccggcgggtaggaatcccgccggcgagccgaacagttccccgagcgcagcccgcggaccaccacccggccgcacgggccgcttttgtcccccgcccgccgcttctgtccgagaggccgcccgcgaggcgcatcctgaccgcgagcgtcgggtcccagagccgggcgcggctggggcccgaggctagcatctctcgggagccgcaaggcgagagctgcaaagatgtaaaagtcaagagaagactctaaaaatagcaaagatgcttttgagccagaatgccttcatcttcagatcacttaatttggttctcatggtgtatatcagcctcgtgtttggtatttcatatgattcgcctgattacacagatgaatcttgcactttcaagatatcattgcgaaatttccggtccatcttatcatgggaattaaaaaaccactccattgtaccaactcactatacattgctgtatacaatcatgagtaaaccagaagatttgaaggtggttaagaactgtgcaaataccacaagatcattttgtgacctcacagatgagtggagaagcacacacgaggcctatgtcaccgtcctagaaggattcagcgggaacacaacgttgttcagttgctcacacaatttctggctggccatagacatgtcttttgaaccaccagagtttgagattgttggttttaccaaccacattaatgtgatggtgaaatttccatctattgttgaggaagaattacagtttgatttatctctcgtcattgaagaacagtcagagggaattgttaagaagcataaacccgaaataaaaggaaacatgagtggaaatttcacctatatcattgacaagttaattccaaacacgaactactgtgtatctgtttatttagagcacagtgatgagcaagcagtaataaagtctcccttaaaatgcaccctccttccacctggccaggaatcagaatcagcagaatctgccaaaataggaggaataattactgtgtttttgatagcattggtcttgacaagcaccatagtgacactgaaatggattggttatatatgcttaagaaatagcctccccaaagtcttgaggcaaggtctcgctaagggctggaatgcagtggctattcacaggtgcagtcataatgcactacagtctgaaactcctgagctcaaacagtcgtcctgcctaagcttccccagtagctgggattacaagcgtgcatccctgtgccccagtgattaagttttattatgtagaaaataaagagcaaacagtacagctgatacggactctctctctctttttttttttttttaagaattttcataactttttagcctggccatttcctaacctgccaccgttggaagccatggatatggtggaggtcatttacatcaacagaaagaagaaagtgtgggattataattatgatgatgaaagtgatagcgatactgaggcagcgcccaggacaagtggcggtggctataccatgcatggactgactgtcaggcctctgggtcaggcctctgccacctctacagaatcccagttgatagacccggagtccgaggaggagcctgacctgcctgaggttgatgtggagctccccacgatgccaaaggacagccctcagcagttggaactcttgagtgggccctgtgagaggagaaagagtccactccaggacccttttcccgaagaggactacagctccacggaggggtctgggggcagaattaccttcaatgtggacttaaactctgtgtttttgagagttcttgatgacgaggacagtgacgacttagaagcccctctgatgctatcgtctcatctggaagagatggttgacccagaggatcctgataatgtgcaatcaaaccatttgctggccagcggggaagggacacagccaacctttcccagcccctcttcagagggcctgtggtccgaagatgctccatctgatcaaagtgacacttctgagtcagatgttgaccttggggatggttatataatgagatgactccaaaactattgaatgaacttggacagacaagcacctacagggttctttgtctctgcatcctaacttgctgccttatcgtctgcaagtgttctccaagggaaggaggaggaaactgtggtgttcctttcttccaggtgacatcacctatgcacattcccagtatggggaccatagtatcattcagtgcattgtttacatattcaaagtggtgcactttgaaggaagcacatgtgcacctttcctttacactaatgcacttaggatgtttctgcatcatgtctaccagggagcagggttccccacagtttcagaggtggtccaggaccctatgatatttctcttctttcgttcttttttttttttttttttgagacagagtctcgttctgtcgcccaagctggagcgcaatggtgtgatcttggctcactgcaacatccgcctcccaggttcaagtgattctcctgcctcagcctccctcgcaagtagctgggattacaggcgcctgccaccatgcctagcaaatttttgtatttttagtagagacaggattttaccatgttggccaggctggtctcaaactcctgacctcaagtgatctgccctcctcagcctcgtaaagtgctgggattacaggggtgagccgctgtgcctggctggccctgtgatatttctgtgaaataaattgggccagggtgggagcagggaaagaaaaggaaaatagtagcaagagctgcaaagcaggcaggaagggaggaggagagccaggtgagcagtggagagaaggggggccctgcacaaggaaacagggaagagccatcgaagtttcagtcggtgagccttgggcacctcacccatgtcacatcctgtctcctgcaattggaattccaccttgtccagccctccccagttaaagtggggaagacagactttaggatcacgtgtgtgactaatacagaaaggaaacatggcgtcggggagagggataaaacctgaatgccatattttaagttaaaaaaaaaaaaagcaaacacaaagatgcttcaagatcttcaggagaagtatggtatacaagtttcagggaccctatttgacaattttcagagtgctctctatgctgattccgagtcgagtgtgtcagctgtgattacagtgcctgtggatctaggccgggttgggggggtgtgggcgggggaagggaagtctggcccggagcaattgctcctgccggtaaccccagcactttgggatgcctaaacaggcgtatcgcttgaggccagtaattcgagaccagcctgggcaacatggcaaatctgtctctacaaaacaaaattagaaaaattaactgggcgtagtggcatgtgcctgttgtcccagctacttgggaggctgaggtgggagaatggcttgagcccaggaagcggaggttgcagtgagccaagatcatgtcactgcacttcagcctgggtgacagaaccagaccctgtctttaaaaagggagttggtggggagaggttctagaatgtcatgtagcaaccagtttaaggactgggactcagggatccaactcccacagtttccctgtgtgaccctaggcatttgacttagcctttctgagcctcaggttttttgtttctgaagtaaaaggattggactaggtaatctccaagatcctaggaacccaggagaaagatgagaaaatgtacaagaatgaacactcaggtggaaatgctgcaatcctgagaagctcccaggatgaatgaaaggcacaggacctcttacccctcacccctgcccccctcaagagctggtttctcaaacctttctcttaggccccttcaaagggggaaaactaaaaattatacaagttatagttcaaggactttaaatagattatttatatgattgctcataaggatgaggctgtgaggagggaacaccttatttaatctaatgaaattccataggaaagaggccttttgtatattgaatcaatttatctgccttctcagtgcatctgtcatattctgaaagattctgggttgatcttttgcgataacctctatggctgtgagtgtgtgtgtgtgtttgtgtattttttaacattttgtataatgattggaggttggtaaaaagtaacacaacagtacttttttaatacaaa

SEQ ID NO: 4 - DNA, 4074 bp, Homo sapiens
  source 1..4074: mol_type = genomic DNA
gtatcgctcctcgtaggccggggctcggcgcgcgcacccgcactaaagacgcttcttcccggcgggtaggaatcccgccggcgagccgaacagttccccgagcgcagcccgcggaccaccacccggccgcacgggccgcttttgtcccccgcccgccgcttctgtccgagaggccgcccgcgaggcgcatcctgaccgcgagcgtcgggtcccagagccgggcgcggctggggcccgaggctagcatctctcgggagccgcaaggcgagagctgcaaagtttaattagacacttcagaattttgatcacctaatgttgatttcagatgtaaaagtcaagagaagactctaaaaatagcaaagatgcttttgagccagaatgccttcatcttcagatcacttaatttggttctcatggtgtatatcagcctcgtgtttggtatttcatatgattcgcctgattacacagatgaatcttgcactttcaagatatcattgcgaaatttccggtccatcttatcatgggaattaaaaaaccactccattgtaccaactcactatacattgctgtatacaatcatgagtaaaccagaagatttgaaggtggttaagaactgtgcaaataccacaagatcattttgtgacctcacagatgagtggagaagcacacacgaggcctatgtcaccgtcctagaaggattcagcgggaacacaacgttgttcagttgctcacacaatttctggctggccatagacatgtcttttgaaccaccagagtttgagattgttggttttaccaaccacattaatgtgatggtgaaatttccatctattgttgaggaagaattacagtttgatttatctctcgtcattgaagaacagtcagagggaattgttaagaagcataaacccgaaataaaaggaaacatgagtggaaatttcacctatatcattgacaagttaattccaaacacgaactactgtgtatctgtttatttagagcacagtgatgagcaagcagtaataaagtctcccttaaaatgcaccctccttccacctggccaggaatcagaatcagcagaatctgccaaaataggaggaataattactgtgtttttgatagcattggtcttgacaagcaccatagtgacactgaaatggattggttatatatgcttaagaaatagcctccccaaagtcttgaattttcataactttttagcctggccatttcctaacctgccaccgttggaagccatggatatggtggaggtcatttacatcaacagaaagaagaaagtgtgggattataattatgatgatgaaagtgatagcgatactgaggcagcgcccaggacaagtggcggtggctataccatgcatggactgactgtcaggcctctgggtcaggcctctgccacctctacagaatcccagttgatagacccggagtccgaggaggagcctgacctgcctgaggttgatgtggagctccccacgatgccaaaggacagccctcagcagttggaactcttgagtgggccctgtgagaggagaaagagtccactccaggacccttttcccgaagaggactacagctccacggaggggtctgggggcagaattaccttcaatgtggacttaaactctgtgtttttgagagttcttgatgacgaggacagtgacgacttagaagcccctctgatgctatcgtctcatctggaagagatggttgacccagaggatcctgataatgtgcaatcaaaccatttgctggccagcggggaagggacacagccaacctttcccagcccctcttcagagggcctgtggtccgaagatgctccatctgatcaaagtgacacttctgagtcagatgttgaccttggggatggttatataatgagatgactccaaaactattgaatgaacttggacagacaagcacctacagggttctttgtctctgcatcctaacttgctgccttatcgtctgcaagtgttctccaagggaaggaggaggaaactgtggtgttcctttcttccaggtgacatcacctatgcacattcccagtatggggaccatagtatcattcagtgcattgtttacatattcaaagtggtgcactttgaaggaagcacatgtgcacctttcctttacactaatgcacttaggatgtttctgcatcatgtctaccagggagcagggttccccacagtttcagaggtggtccaggaccctatgatatttctcttctttcgttcttttttttttttttttttgagacagagtctcgttctgtcgcccaagctggagcgcaatggtgtgatcttggctcactgcaacatccgcctcccaggttcaagtgattctcctgcctcagcctccctcgcaagtagctgggattacaggcgcctgccaccatgcctagcaaatttttgtatttttagtagagacaggattttaccatgttggccaggctggtctcaaactcctgacctcaagtgatctgccctcctcagcctcgtaaagtgctgggattacaggggtgagccgctgtgcctggctggccctgtgatatttctgtgaaataaattgggccagggtgggagcagggaaagaaaaggaaaatagtagcaagagctgcaaagcaggcaggaagggaggaggagagccaggtgagcagtggagagaaggggggccctgcacaaggaaacagggaagagccatcgaagtttcagtcggtgagccttgggcacctcacccatgtcacatcctgtctcctgcaattggaattccaccttgtccagccctccccagttaaagtggggaagacagactttaggatcacgtgtgtgactaatacagaaaggaaacatggcgtcggggagagggataaaacctgaatgccatattttaagttaaaaaaaaaaaaagcaaacacaaagatgcttcaagatcttcaggagaagtatggtatacaagtttcagggaccctatttgacaattttcagagtgctctctatgctgattccgagtcgagtgtgtcagctgtgattacagtgcctgtggatctaggccgggttgggggggtgtgggcgggggaagggaagtctggcccggagcaattgctcctgccggtaaccccagcactttgggatgcctaaacaggcgtatcgcttgaggccagtaattcgagaccagcctgggcaacatggcaaatctgtctctacaaaacaaaattagaaaaattaactgggcgtagtggcatgtgcctgttgtcccagctacttgggaggctgaggtgggagaatggcttgagcccaggaagcggaggttgcagtgagccaagatcatgtcactgcacttcagcctgggtgacagaaccagaccctgtctttaaaaagggagttggtggggagaggttctagaatgtcatgtagcaaccagtttaaggactgggactcagggatccaactcccacagtttccctgtgtgaccctaggcatttgacttagcctttctgagcctcaggttttttgtttctgaagtaaaaggattggactaggtaatctccaagatcctaggaacccaggagaaagatgagaaaatgtacaagaatgaacactcaggtggaaatgctgcaatcctgagaagctcccaggatgaatgaaaggcacaggacctcttacccctcacccctgcccccctcaagagctggtttctcaaacctttctcttaggccccttcaaagggggaaaactaaaaattatacaagttatagttcaaggactttaaatagattatttatatgattgctcataaggatgaggctgtgaggagggaacaccttatttaatctaatgaaattccataggaaagaggccttttgtatattgaatcaatttatctgccttctcagtgcatctgtcatattctgaaagattctgggttgatcttttgcgataacctctatggctgtgagtgtgtgtgtgtgtttgtgtattttttaacattttgtataatgattggaggttggtaaaaagtaacacaacagtacttttttaatacaaa

SEQ ID NO: 5 - DNA, 4028 bp, Homo sapiens
  source 1..4028: mol_type = genomic DNA
gtatcgctcctcgtaggccggggctcggcgcgcgcacccgcactaaagacgcttcttcccggcgggtaggaatcccgccggcgagccgaacagttccccgagcgcagcccgcggaccaccacccggccgcacgggccgcttttgtcccccgcccgccgcttctgtccgagaggccgcccgcgaggcgcatcctgaccgcgagcgtcgggtcccagagccgggcgcggctggggcccgaggctagcatctctcgggagccgcaaggcgagagctgcaaagatgtaaaagtcaagagaagactctaaaaatagcaaagatgcttttgagccagaatgccttcatcttcagatcacttaatttggttctcatggtgtatatcagcctcgtgtttggtatttcatatgattcgcctgattacacagatgaatcttgcactttcaagatatcattgcgaaatttccggtccatcttatcatgggaattaaaaaaccactccattgtaccaactcactatacattgctgtatacaatcatgagtaaaccagaagatttgaaggtggttaagaactgtgcaaataccacaagatcattttgtgacctcacagatgagtggagaagcacacacgaggcctatgtcaccgtcctagaaggattcagcgggaacacaacgttgttcagttgctcacacaatttctggctggccatagacatgtcttttgaaccaccagagtttgagattgttggttttaccaaccacattaatgtgatggtgaaatttccatctattgttgaggaagaattacagtttgatttatctctcgtcattgaagaacagtcagagggaattgttaagaagcataaacccgaaataaaaggaaacatgagtggaaatttcacctatatcattgacaagttaattccaaacacgaactactgtgtatctgtttatttagagcacagtgatgagcaagcagtaataaagtctcccttaaaatgcaccctccttccacctggccaggaatcagaatcagcagaatctgccaaaataggaggaataattactgtgtttttgatagcattggtcttgacaagcaccatagtgacactgaaatggattggttatatatgcttaagaaatagcctccccaaagtcttgaattttcataactttttagcctggccatttcctaacctgccaccgttggaagccatggatatggtggaggtcatttacatcaacagaaagaagaaagtgtgggattataattatgatgatgaaagtgatagcgatactgaggcagcgcccaggacaagtggcggtggctataccatgcatggactgactgtcaggcctctgggtcaggcctctgccacctctacagaatcccagttgatagacccggagtccgaggaggagcctgacctgcctgaggttgatgtggagctccccacgatgccaaaggacagccctcagcagttggaactcttgagtgggccctgtgagaggagaaagagtccactccaggacccttttcccgaagaggactacagctccacggaggggtctgggggcagaattaccttcaatgtggacttaaactctgtgtttttgagagttcttgatgacgaggacagtgacgacttagaagcccctctgatgctatcgtctcatctggaagagatggttgacccagaggatcctgataatgtgcaatcaaaccatttgctggccagcggggaagggacacagccaacctttcccagcccctcttcagagggcctgtggtccgaagatgctccatctgatcaaagtgacacttctgagtcagatgttgaccttggggatggttatataatgagatgactccaaaactattgaatgaacttggacagacaagcacctacagggttctttgtctctgcatcctaacttgctgccttatcgtctgcaagtgttctccaagggaaggaggaggaaactgtggtgttcctttcttccaggtgacatcacctatgcacattcccagtatggggaccatagtatcattcagtgcattgtttacatattcaaagtggtgcactttgaaggaagcacatgtgcacctttcctttacactaatgcacttaggatgtttctgcatcatgtctaccagggagcagggttccccacagtttcagaggtggtccaggaccctatgatatttctcttctttcgttcttttttttttttttttttgagacagagtctcgttctgtcgcccaagctggagcgcaatggtgtgatcttggctcactgcaacatccgcctcccaggttcaagtgattctcctgcctcagcctccctcgcaagtagctgggattacaggcgcctgccaccatgcctagcaaatttttgtatttttagtagagacaggattttaccatgttggccaggctggtctcaaactcctgacctcaagtgatctgccctcctcagcctcgtaaagtgctgggattacaggggtgagccgctgtgcctggctggccctgtgatatttctgtgaaataaattgggccagggtgggagcagggaaagaaaaggaaaatagtagcaagagctgcaaagcaggcaggaagggaggaggagagccaggtgagcagtggagagaaggggggccctgcacaaggaaacagggaagagccatcgaagtttcagtcggtgagccttgggcacctcacccatgtcacatcctgtctcctgcaattggaattccaccttgtccagccctccccagttaaagtggggaagacagactttaggatcacgtgtgtgactaatacagaaaggaaacatggcgtcggggagagggataaaacctgaatgccatattttaagttaaaaaaaaaaaaagcaaacacaaagatgcttcaagatcttcaggagaagtatggtatacaagtttcagggaccctatttgacaattttcagagtgctctctatgctgattccgagtcgagtgtgtcagctgtgattacagtgcctgtggatctaggccgggttgggggggtgtgggcgggggaagggaagtctggcccggagcaattgctcctgccggtaaccccagcactttgggatgcctaaacaggcgtatcgcttgaggccagtaattcgagaccagcctgggcaacatggcaaatctgtctctacaaaacaaaattagaaaaattaactgggcgtagtggcatgtgcctgttgtcccagctacttgggaggctgaggtgggagaatggcttgagcccaggaagcggaggttgcagtgagccaagatcatgtcactgcacttcagcctgggtgacagaaccagaccctgtctttaaaaagggagttggtggggagaggttctagaatgtcatgtagcaaccagtttaaggactgggactcagggatccaactcccacagtttccctgtgtgaccctaggcatttgacttagcctttctgagcctcaggttttttgtttctgaagtaaaaggattggactaggtaatctccaagatcctaggaacccaggagaaagatgagaaaatgtacaagaatgaacactcaggtggaaatgctgcaatcctgagaagctcccaggatgaatgaaaggcacaggacctcttacccctcacccctgcccccctcaagagctggtttctcaaacctttctcttaggccccttcaaagggggaaaactaaaaattatacaagttatagttcaaggactttaaatagattatttatatgattgctcataaggatgaggctgtgaggagggaacaccttatttaatctaatgaaattccataggaaagaggccttttgtatattgaatcaatttatctgccttctcagtgcatctgtcatattctgaaagattctgggttgatcttttgcgataacctctatggctgtgagtgtgtgtgtgtgtttgtgtattttttaacattttgtataatgattggaggttggtaaaaagtaacacaacagtacttttttaatacaaa

SEQ ID NO: 6 - protein, 331 aa, Homo sapiens
MLLSQNAFIFRSLNLVLMVYISLVFGISYDSPDYTDESCTFKISLRNFRSILSWELKNHSIVPTHYTLLYTIMSKPEDLKVVKNCANTTRSFCDLTDEWRSTHEAYVTVLEGFSGNTTLFSCSHNFWLAIDMSFEPPEFEIVGFTNHINVMVKFPSIVEEELQFDLSLVIEEQSEGIVKKHKPEIKGNMSGNFTYIIDKLIPNTNYCVSVYLEHSDEQAVIKSPLKCTLLPPGQESESAESAKIGGIITVFLIALVLTSTIVTLKWIGYICLRNSLPKVLRQGLAKGWNAVAIHRCSHNALQSETPELKQSSCLSFPSSWDYKRASLCPSD

SEQ ID NO: 7 - protein, 515 aa, Homo sapiens [sequence omitted]

SEQ ID NO: 8 - RNA, 19 nt, synthetic construct
  source 1..19: mol_type = other RNA
ctccccaaagtcttgaatt

SEQ ID NO: 9 - RNA, 19 nt, synthetic construct
  source 1..19: mol_type = other RNA
agttttggagtcatctcat

SEQ ID NO: 10 - RNA, 19 nt, synthetic construct
  source 1..19: mol_type = other RNA
tccccaaagtcttgaattt

SEQ ID NO: 11 - RNA, 19 nt, synthetic construct
  source 1..19: mol_type = other RNA
gttttggagtcatctcatt

SEQ ID NO: 12 - RNA, 19 nt, synthetic construct
  source 1..19: mol_type = other RNA
ccccaaagtcttgaatttt

SEQ ID NO: 13 - RNA, 19 nt, synthetic construct
  source 1..19: mol_type = other RNA
ttttggagtcatctcatta

SEQ ID NO: 14 - RNA, 19 nt, synthetic construct
  source 1..19: mol_type = other RNA
cccaaagtcttgaattttc

SEQ ID NO: 15 - RNA, 19 nt, synthetic construct
  source 1..19: mol_type = other RNA
tttggagtcatctcattat

SEQ ID NO: 16 - RNA, 19 nt, synthetic construct
  source 1..19: mol_type = other RNA
ccaaagtcttgaattttca

SEQ ID NO: 17 - RNA, 19 nt, synthetic construct
  source 1..19: mol_type = other RNA
ttggagtcatctcattata

SEQ ID NO: 18 - RNA, 19 nt, synthetic construct
  source 1..19: mol_type = other RNA
caaagtcttgaattttcat

SEQ ID NO: 19 - RNA, 19 nt, synthetic construct
  source 1..19: mol_type = other RNA
tggagtcatctcattatat

SEQ ID NO: 20 - RNA, 19 nt, synthetic construct
  source 1..19: mol_type = other RNA
aaagtcttgaattttcata

SEQ ID NO: 21 - RNA, 19 nt, synthetic construct
  source 1..19: mol_type = other RNA
ggagtcatctcattatata

SEQ ID NO: 22 - RNA, 19 nt, synthetic construct
  source 1..19: mol_type = other RNA
aagtcttgaattttcataa

SEQ ID NO: 23 - RNA, 19 nt, synthetic construct
  source 1..19: mol_type = other RNA
gagtcatctcattatataa

SEQ ID NO: 24 - RNA, 19 nt, synthetic construct
  source 1..19: mol_type = other RNA
agtcttgaattttcataac

SEQ ID NO: 25 - RNA, 19 nt, synthetic construct
  source 1..19: mol_type = other RNA
agtcatctcattatataac

SEQ ID NO: 26 - RNA, 19 nt, synthetic construct
  source 1..19: mol_type = other RNA
gtcttgaattttcataact

SEQ ID NO: 27 - RNA, 19 nt, synthetic construct
  source 1..19: mol_type = other RNA
gtcatctcattatataacc

SEQ ID NO: 28 - RNA, 19 nt, synthetic construct
  source 1..19: mol_type = other RNA
tcttgaattttcataactt

SEQ ID NO: 29 - RNA, 19 nt, synthetic construct
  source 1..19: mol_type = other RNA
tcatctcattatataacca

SEQ ID NO: 30 - RNA, 19 nt, synthetic construct
  source 1..19: mol_type = other RNA
cttgaattttcataacttt

SEQ ID NO: 31 - RNA, 19 nt, synthetic construct
  source 1..19: mol_type = other RNA
catctcattatataaccat

SEQ ID NO: 32 - RNA, 19 nt, synthetic construct
  source 1..19: mol_type = other RNA
ttgaattttcataactttt

SEQ ID NO: 33 - RNA, 19 nt, synthetic construct
  source 1..19: mol_type = other RNA
atctcattatataaccatc

SEQ ID NO: 34 - RNA, 19 nt, synthetic construct
  source 1..19: mol_type = other RNA
tgaattttcataacttttt

SEQ ID NO: 35 - RNA, 19 nt, synthetic construct
  source 1..19: mol_type = other RNA
tctcattatataaccatcc

SEQ ID NO: 36 - RNA, 19 nt, synthetic construct
  source 1..19: mol_type = other RNA
gaattttcataacttttta

SEQ ID NO: 37 - RNA, 19 nt, synthetic construct
  source 1..19: mol_type = other RNA
ctcattatataaccatccc

SEQ ID NO: 38 - RNA, 19 nt, synthetic construct
  source 1..19: mol_type = other RNA
aattttcataactttttag

SEQ ID NO: 39 - RNA, 19 nt, synthetic construct
  source 1..19: mol_type = other RNA
tcattatataaccatcccc

SEQ ID NO: 40 - RNA, 19 nt, synthetic construct
  source 1..19: mol_type = other RNA
attttcataactttttagc

SEQ ID NO: 41 - RNA, 19 nt, synthetic construct
  source 1..19: mol_type = other RNA
cattatataaccatcccca

SEQ ID NO: 42 - RNA, 19 nt, synthetic construct
  source 1..19: mol_type = other RNA
ttttcataactttttagcc

SEQ ID NO: 43 - RNA, 19 nt, synthetic construct
  source 1..19: mol_type = other RNA
attatataaccatccccaa

SEQ ID NO: 44 - RNA, 19 nt, synthetic construct
  source 1..19: mol_type = other RNA
tttcataactttttagcct

SEQ ID NO: 45 - RNA, 19 nt, synthetic construct
  source 1..19: mol_type = other RNA
ttatataaccatccccaag

SEQ ID NO: 46 - RNA, 19 nt, synthetic construct
  source 1..19: mol_type = other RNA
ttcataactttttagcctg

SEQ ID NO: 47 - RNA, 19 nt, synthetic construct
  source 1..19: mol_type = other RNA
tatataaccatccccaagg

SEQ ID NO: 48 - RNA, 19 nt, synthetic construct
  source 1..19: mol_type = other RNA
tcataactttttagcctgg

SEQ ID NO: 49 - RNA, 19 nt, synthetic construct
  source 1..19: mol_type = other RNA
atataaccatccccaaggt

SEQ ID NO: 50 - RNA, 19 nt, synthetic construct
  source 1..19: mol_type = other RNA
cataactttttagcctggc

SEQ ID NO: 51 - RNA, 19 nt, synthetic construct
  source 1..19: mol_type = other RNA
tataaccatccccaaggtc

SEQ ID NO: 52 - RNA, 19 nt, synthetic construct
  source 1..19: mol_type = other RNA
ataactttttagcctggcc

SEQ ID NO: 53 - RNA, 19 nt, synthetic construct
  source 1..19: mol_type = other RNA
ataaccatccccaaggtca

SEQ ID NO: 54 - RNA, 19 nt, synthetic construct
  source 1..19: mol_type = other RNA
taactttttagcctggcca

SEQ ID NO: 55 - RNA, 19 nt, synthetic construct
  source 1..19: mol_type = other RNA
taaccatccccaaggtcaa

SEQ ID NO: 56 - RNA, 19 nt, synthetic construct
  source 1..19: mol_type = other RNA
aactttttagcctggccat

SEQ ID NO: 57 - RNA, 19 nt, synthetic construct
  source 1..19: mol_type = other RNA
aaccatccccaaggtcaac

SEQ ID NO: 58 - RNA, 19 nt, synthetic construct
  source 1..19: mol_type = other RNA
actttttagcctggccatt

SEQ ID NO: 59 - RNA, 19 nt, synthetic construct
  source 1..19: mol_type = other RNA
accatccccaaggtcaaca

SEQ ID NO: 60 - RNA, 19 nt, synthetic construct
  source 1..19: mol_type = other RNA
ctttttagcctggccattt

SEQ ID NO: 61 - RNA, 19 nt, synthetic construct
  source 1..19: mol_type = other RNA
ccatccccaaggtcaacat

SEQ ID NO: 62 - RNA, 19 nt, synthetic construct
  source 1..19: mol_type = other RNA
tttttagcctggccatttc

SEQ ID NO: 63 - RNA, 19 nt, synthetic construct
  source 1..19: mol_type = other RNA
catccccaaggtcaacatc

SEQ ID NO: 64 - RNA, 19 nt, synthetic construct
  source 1..19: mol_type = other RNA
ttttagcctggccatttcc

SEQ ID NO: 65 - RNA, 19 nt, synthetic construct
  source 1..19: mol_type = other RNA
atccccaaggtcaacatct

SEQ ID NO: 66 - RNA, 19 nt, synthetic construct
  source 1..19: mol_type = other RNA
tttagcctggccatttcct

SEQ ID NO: 67 - RNA, 19 nt, synthetic construct
  source 1..19: mol_type = other RNA
tccccaaggtcaacatctg

SEQ ID NO: 68 - RNA, 19 nt, synthetic construct
  source 1..19: mol_type = other RNA
ttagcctggccatttccta

SEQ ID NO: 69 - RNA, 19 nt, synthetic construct
  source 1..19: mol_type = other RNA
ccccaaggtcaacatctga

SEQ ID NO: 70 - RNA, 19 nt, synthetic construct
  source 1..19: mol_type = other RNA
tagcctggccatttcctaa

SEQ ID NO: 71 - RNA, 19 nt, synthetic construct
  source 1..19: mol_type = other RNA
cccaaggtcaacatctgac

SEQ ID NO: 72 - RNA, 19 nt, synthetic construct
  source 1..19: mol_type = other RNA
agcctggccatttcctaac

SEQ ID NO: 73 - RNA, 19 nt, synthetic construct
  source 1..19: mol_type = other RNA
ccaaggtcaacatctgact

SEQ ID NO: 74 - RNA, 19 nt, synthetic construct
  source 1..19: mol_type = other RNA
gcctggccatttcctaacc

SEQ ID NO: 75 - RNA, 19 nt, synthetic construct
  source 1..19: mol_type = other RNA
caaggtcaacatctgactc

SEQ ID NO: 76 - RNA, 19 nt, synthetic construct
  source 1..19: mol_type = other RNA
cctggccatttcctaacct

SEQ ID NO: 77 - RNA, 19 nt, synthetic construct
  source 1..19: mol_type = other RNA
aaggtcaacatctgactca

SEQ ID NO: 78 - RNA, 19 nt, synthetic construct
  source 1..19: mol_type = other RNA
ctggccatttcctaacctg

SEQ ID NO: 79 - RNA, 19 nt, synthetic construct
  source 1..19: mol_type = other RNA
aggtcaacatctgactcag

SEQ ID NO: 80 - RNA, 19 nt, synthetic construct
  source 1..19: mol_type = other RNA
tggccatttcctaacctgc

SEQ ID NO: 81 - RNA, 19 nt, synthetic construct
  source 1..19: mol_type = other RNA
ggtcaacatctgactcaga

SEQ ID NO: 82 - RNA, 19 nt, synthetic construct
  source 1..19: mol_type = other RNA
ggccatttcctaacctgcc

SEQ ID NO: 83 - RNA, 19 nt, synthetic construct
  source 1..19: mol_type = other RNA
gtcaacatctgactcagaa

SEQ ID NO: 84 - RNA, 19 nt, synthetic construct
  source 1..19: mol_type = other RNA
gccatttcctaacctgcca

SEQ ID NO: 85 - RNA, 19 nt, synthetic construct
  source 1..19: mol_type = other RNA
tcaacatctgactcagaag

SEQ ID NO: 86 - RNA, 19 nt, synthetic construct
  source 1..19: mol_type = other RNA
ccatttcctaacctgccac

SEQ ID NO: 87 - RNA, 19 nt, synthetic construct
  source 1..19: mol_type = other RNA
caacatctgactcagaagt

SEQ ID NO: 88 - RNA, 19 nt, synthetic construct
  source 1..19: mol_type = other RNA
catttcctaacctgccacc

SEQ ID NO: 89 - RNA, 19 nt, synthetic construct
  source 1..19: mol_type = other RNA
aacatctgactcagaagtg

SEQ ID NO: 90 - RNA, 19 nt, synthetic construct
  source 1..19: mol_type = other RNA
atttcctaacctgccaccg

SEQ ID NO: 91 - RNA, 19 nt, synthetic construct
  source 1..19: mol_type = other RNA
acatctgactcagaagtgt

SEQ ID NO: 92 - RNA, 19 nt, synthetic construct
  source 1..19: mol_type = other RNA
tttcctaacctgccaccgt

SEQ ID NO: 93 - RNA, 19 nt, synthetic construct
  source 1..19: mol_type = other RNA
catctgactcagaagtgtc

SEQ ID NO: 94 - RNA, 19 nt, synthetic construct
  source 1..19: mol_type = other RNA
ttcctaacctgccaccgtt

SEQ ID NO: 95 - RNA, 19 nt, synthetic construct
  source 1..19: mol_type = other RNA
atctgactcagaagtgtca

SEQ ID NO: 96 - RNA, 19 nt, synthetic construct
  source 1..19: mol_type = other RNA
tcctaacctgccaccgttg

SEQ ID NO: 97 - RNA, 19 nt, synthetic construct
  source 1..19: mol_type = other RNA
tctgactcagaagtgtcac

SEQ ID NO: 98 - RNA, 19 nt, synthetic construct
  source 1..19: mol_type = other RNA
cctaacctgccaccgttgg

SEQ ID NO: 99 - RNA, 19 nt, synthetic construct
  source 1..19: mol_type = other RNA
ctgactcagaagtgtcact

SEQ ID NO: 100 - RNA, 19 nt, synthetic construct
  source 1..19: mol_type = other RNA
ctaacctgccaccgttgga

SEQ ID NO: 101 - RNA, 19 nt, synthetic construct
  source 1..19: mol_type = other RNA
tgactcagaagtgtcactt

SEQ ID NO: 102 - RNA, 19 nt, synthetic construct
  source 1..19: mol_type = other RNA
taacctgccaccgttggaa

SEQ ID NO: 103 - RNA, 19 nt, synthetic construct
  source 1..19: mol_type = other RNA
gactcagaagtgtcacttt

SEQ ID NO: 104 - RNA, 19 nt, synthetic construct
  source 1..19: mol_type = other RNA
aacctgccaccgttggaag

SEQ ID NO: 105 - RNA, 19 nt, synthetic construct
  source 1..19: mol_type = other RNA
actcagaagtgtcactttg

SEQ ID NO: 106 - RNA, 19 nt, synthetic construct
  source 1..19: mol_type = other RNA
acctgccaccgttggaagc

SEQ ID NO: 107 - RNA, 19 nt, synthetic construct
  source 1..19: mol_type = other RNA
ctcagaagtgtcactttga

SEQ ID NO: 108 - RNA, 19 nt, synthetic construct
  source 1..19: mol_type = other RNA
cctgccaccgttggaagcc

SEQ ID NO: 109 - RNA, 19 nt, synthetic construct
  source 1..19: mol_type = other RNA
tcagaagtgtcactttgat

SEQ ID NO: 110 - RNA, 19 nt, synthetic construct
  source 1..19: mol_type = other RNA
ctgccaccgttggaagcca

SEQ ID NO: 111 - RNA, 19 nt, synthetic construct
  source 1..19: mol_type = other RNA
cagaagtgtcactttgatc

SEQ ID NO: 112 - RNA, 19 nt, synthetic construct
  source 1..19: mol_type = other RNA
tgccaccgttggaagccat

SEQ ID NO: 113 - RNA, 19 nt, synthetic construct
  source 1..19: mol_type = other RNA
agaagtgtcactttgatca

SEQ ID NO: 114 - RNA, 19 nt, synthetic construct
  source 1..19: mol_type = other RNA
gccaccgttggaagccatg

SEQ ID NO: 115 - RNA, 19 nt, synthetic construct
  source 1..19: mol_type = other RNA
gaagtgtcactttgatcag

SEQ ID NO: 116 - RNA, 19 nt, synthetic construct
  source 1..19: mol_type = other RNA
ccaccgttggaagccatgg

SEQ ID NO: 117 - RNA, 19 nt, synthetic construct
  source 1..19: mol_type = other RNA
aagtgtcactttgatcaga

SEQ ID NO: 118 - RNA, 19 nt, synthetic construct
  source 1..19: mol_type = other RNA
caccgttggaagccatgga

SEQ ID NO: 119 - RNA, 19 nt, synthetic construct
  source 1..19: mol_type = other RNA
agtgtcactttgatcagat

SEQ ID NO: 120 - RNA, 19 nt, synthetic construct
  source 1..19: mol_type = other RNA
accgttggaagccatggat

SEQ ID NO: 121 - RNA, 19 nt, synthetic construct
  source 1..19: mol_type = other RNA
gtgtcactttgatcagatg

SEQ ID NO: 122 - RNA, 19 nt, synthetic construct
  source 1..19: mol_type = other RNA
ccgttggaagccatggata

SEQ ID NO: 123 - RNA, 19 nt, synthetic construct
  source 1..19: mol_type = other RNA
tgtcactttgatcagatgg

SEQ ID NO: 124 - RNA, 19 nt, synthetic construct
  source 1..19: mol_type = other RNA
cgttggaagccatggatat

SEQ ID NO: 125 - RNA, 19 nt, synthetic construct
  source 1..19: mol_type = other RNA
gtcactttgatcagatgga

SEQ ID NO: 126 - RNA, 19 nt, synthetic construct
  source 1..19: mol_type = other RNA
gttggaagccatggatatg

SEQ ID NO: 127 - RNA, 19 nt, synthetic construct
  source 1..19: mol_type = other RNA
tcactttgatcagatggag

SEQ ID NO: 128 - RNA, 19 nt, synthetic construct
  source 1..19: mol_type = other RNA
ttggaagccatggatatgg

SEQ ID NO: 129 - RNA, 19 nt, synthetic construct
  source 1..19: mol_type = other RNA
cactttgatcagatggagc

SEQ ID NO: 130 - RNA, 19 nt, synthetic construct
  source 1..19: mol_type = other RNA
tggaagccatggatatggt

SEQ ID NO: 131 - RNA, 19 nt, synthetic construct
  source 1..19: mol_type = other RNA
actttgatcagatggagca

SEQ ID NO: 132 - RNA, 19 nt, synthetic construct
  source 1..19: mol_type = other RNA
ggaagccatggatatggtg

SEQ ID NO: 133 - RNA, 19 nt, synthetic construct
  source 1..19: mol_type = other RNA
ctttgatcagatggagcat

SEQ ID NO: 134 - RNA, 19 nt, synthetic construct
  source 1..19: mol_type = other RNA
gaagccatggatatggtgg

SEQ ID NO: 135 - RNA, 19 nt, synthetic construct
  source 1..19: mol_type = other RNA
tttgatcagatggagcatc

SEQ ID NO: 136 - RNA, 19 nt, synthetic construct
  source 1..19: mol_type = other RNA
aagccatggatatggtgga

SEQ ID NO: 137 - RNA, 19 nt, synthetic construct
  source 1..19: mol_type = other RNA
ttgatcagatggagcatct

SEQ ID NO: 138 - RNA, 19 nt, synthetic construct
  source 1..19: mol_type = other RNA
agccatggatatggtggag

SEQ ID NO: 139 - RNA, 19 nt, synthetic construct
  source 1..19: mol_type = other RNA
tgatcagatggagcatctt

SEQ ID NO: 140 - RNA, 19 nt, synthetic construct
  source 1..19: mol_type = other RNA
gccatggatatggtggagg

SEQ ID NO: 141 - RNA, 19 nt, synthetic construct
  source 1..19: mol_type = other RNA
gatcagatggagcatcttc

SEQ ID NO: 142 - RNA, 19 nt, synthetic construct
  source 1..19: mol_type = other RNA
ccatggatatggtggaggt

SEQ ID NO: 143 - RNA, 19 nt, synthetic construct
  source 1..19: mol_type = other RNA
atcagatggagcatcttcg

SEQ ID NO: 144 - RNA, 19 nt, synthetic construct
  source 1..19: mol_type = other RNA
catggatatggtggaggtc

SEQ ID NO: 145 - RNA, 19 nt, synthetic construct
  source 1..19: mol_type = other RNA
tcagatggagcatcttcgg

SEQ ID NO: 146 - RNA, 19 nt, synthetic construct
  source 1..19: mol_type = other RNA
atggatatggtggaggtca

SEQ ID NO: 147 - RNA, 19 nt, synthetic construct
  source 1..19: mol_type = other RNA
cagatggagcatcttcgga

SEQ ID NO: 148 - RNA, 19 nt, synthetic construct
  source 1..19: mol_type = other RNA
tggatatggtggaggtcat

SEQ ID NO: 149 - RNA, 19 nt, synthetic construct
  source 1..19: mol_type = other RNA
agatggagcatcttcggac

SEQ ID NO: 150 - RNA, 19 nt, synthetic construct
  source 1..19: mol_type = other RNA
ggatatggtggaggtcatt

SEQ ID NO: 151 - RNA, 19 nt, synthetic construct
  source 1..19: mol_type = other RNA
gatggagcatcttcggacc

SEQ ID NO: 152 - RNA, 19 nt, synthetic construct
  source 1..19: mol_type = other RNA
gatatggtggaggtcattt

SEQ ID NO: 153 - RNA, 19 nt, synthetic construct
  source 1..19: mol_type = other RNA
atggagcatcttcggacca

SEQ ID NO: 154 - RNA, 19 nt, synthetic construct
  source 1..19: mol_type = other RNA
atatggtggaggtcattta

SEQ ID NO: 155 - RNA, 19 nt, synthetic construct
  source 1..19: mol_type = other RNA
tggagcatcttcggaccac

SEQ ID NO: 156 - RNA, 19 nt, synthetic construct
  source 1..19: mol_type = other RNA
tatggtggaggtcatttac

SEQ ID NO: 157 - RNA, 19 nt, synthetic construct
  source 1..19: mol_type = other RNA
ggagcatcttcggaccaca

SEQ ID NO: 158 - RNA, 19 nt, synthetic construct
  source 1..19: mol_type = other RNA
atggtggaggtcatttaca

SEQ ID NO: 159 - RNA, 19 nt, synthetic construct
  source 1..19: mol_type = other RNA
gagcatcttcggaccacag

SEQ ID NO: 160 - RNA, 19 nt, synthetic construct
  source 1..19: mol_type = other RNA
tggtggaggtcatttacat

SEQ ID NO: 161 - RNA, 19 nt, synthetic construct
  source 1..19: mol_type = other RNA
agcatcttcggaccacagg

SEQ ID NO: 162 - RNA, 19 nt, synthetic construct
  source 1..19: mol_type = other RNA
ggtggaggtcatttacatc

SEQ ID NO: 163 - RNA, 19 nt, synthetic construct
  source 1..19: mol_type = other RNA
gcatcttcggaccacaggc

SEQ ID NO: 164 - RNA, 19 nt, synthetic construct
  source 1..19: mol_type = other RNA
gtggaggtcatttacatca

SEQ ID NO: 165 - RNA, 19 nt, synthetic construct
  source 1..19: mol_type = other RNA
catcttcggaccacaggcc

SEQ ID NO: 166 - RNA, 19 nt, synthetic construct
  source 1..19: mol_type = other RNA
tggaggtcatttacatcaa

SEQ ID NO: 167 - RNA, 19 nt, synthetic construct
  source 1..19: mol_type = other RNA
atcttcggaccacaggccc

SEQ ID NO: 168 - RNA, 19 nt, synthetic construct
  source 1..19: mol_type = other RNA
ggaggtcatttacatcaac

SEQ ID NO: 169 - RNA, 19 nt, synthetic construct
  source 1..19: mol_type = other RNA
tcttcggaccacaggccct

SEQ ID NO: 170 - RNA, 19 nt, synthetic construct
  source 1..19: mol_type = other RNA
gaggtcatttacatcaaca

SEQ ID NO: 171 - RNA, 19 nt, synthetic construct
  source 1..19: mol_type = other RNA
cttcggaccacaggccctc

SEQ ID NO: 172 - RNA, 19 nt, synthetic construct
  source 1..19: mol_type = other RNA
aggtcatttacatcaacag

SEQ ID NO: 173 - RNA, 19 nt, synthetic construct
  source 1..19: mol_type = other RNA
ttcggaccacaggccctct

SEQ ID NO: 174 - RNA, 19 nt, synthetic construct
  source 1..19: mol_type = other RNA
ggtcatttacatcaacaga

SEQ ID NO: 175 - RNA, 19 nt, synthetic construct
  source 1..19: mol_type = other RNA
tcggaccacaggccctctg

SEQ ID NO: 176 - RNA, 19 nt, synthetic construct
  source 1..19: mol_type = other RNA
gtcatttacatcaacagaa

SEQ ID NO: 177 - RNA, 19 nt, synthetic construct
  source 1..19: mol_type = other RNA
cggaccacaggccctctga

SEQ ID NO: 178 - RNA, 19 nt, synthetic construct
  source 1..19: mol_type = other RNA
tcatttacatcaacagaaa

SEQ ID NO: 179 - RNA, 19 nt, synthetic construct
  source 1..19: mol_type = other RNA
ggaccacaggccctctgaa

SEQ ID NO: 180 - RNA, 19 nt, synthetic construct
  source 1..19: mol_type = other RNA
catttacatcaacagaaag

SEQ ID NO: 181 - RNA, 19 nt, synthetic construct
  source 1..19: mol_type = other RNA
gaccacaggccctctgaag

SEQ ID NO: 182 - RNA, 19 nt, synthetic construct
  source 1..19: mol_type = other RNA
atttacatcaacagaaaga

SEQ ID NO: 183 - RNA, 19 nt, synthetic construct
  source 1..19: mol_type = other RNA
accacaggccctctgaaga

SEQ ID NO: 184 - RNA, 19 nt, synthetic construct
  source 1..19: mol_type = other RNA
tttacatcaacagaaagaa

SEQ ID NO: 185 - RNA, 19 nt, synthetic construct
  source 1..19: mol_type = other RNA
ccacaggccctctgaagag

SEQ ID NO: 186 - RNA, 19 nt, synthetic construct
  source 1..19: mol_type = other RNA
ttacatcaacagaaagaag

SEQ ID NO: 187 - RNA, 19 nt, synthetic construct
  source 1..19: mol_type = other RNA
cacaggccctctgaagagg

SEQ ID NO: 188 - RNA, 19 nt, synthetic construct
  source 1..19: mol_type = other RNA
tacatcaacagaaagaaga

SEQ ID NO: 189 - RNA, 19 nt, synthetic construct
  source 1..19: mol_type = other RNA
acaggccctctgaagaggg

SEQ ID NO: 190 - RNA, 19 nt, synthetic construct
  source 1..19: mol_type = other RNA
acatcaacagaaagaagaa

SEQ ID NO: 191 - RNA, 19 nt, synthetic construct
  source 1..19: mol_type = other RNA
caggccctctgaagagggg

SEQ ID NO: 192 - RNA, 19 nt, synthetic construct
  source 1..19: mol_type = other RNA
catcaacagaaagaagaaa

SEQ ID NO: 193 - RNA, 19 nt, synthetic construct
  source 1..19: mol_type = other RNA
aggccctctgaagaggggc

SEQ ID NO: 194 - RNA, 19 nt, synthetic construct
  source 1..19: mol_type = other RNA
atcaacagaaagaagaaag

SEQ ID NO: 195 - RNA, 19 nt, synthetic construct
  source 1..19: mol_type = other RNA
ggccctctgaagaggggct

SEQ ID NO: 196 - RNA, 19 nt, synthetic construct
  source 1..19: mol_type = other RNA
tcaacagaaagaagaaagt

SEQ ID NO: 197 - RNA, 19 nt, synthetic construct
  source 1..19: mol_type = other RNA
gccctctgaagaggggctg

SEQ ID NO: 198 - RNA, 19 nt, synthetic construct
  source 1..19: mol_type = other RNA
caacagaaagaagaaagtg

SEQ ID NO: 199 - RNA, 19 nt, synthetic construct
  source 1..19: mol_type = other RNA
ccctctgaagaggggctgg

SEQ ID NO: 200 - RNA, 19 nt, synthetic construct
  source 1..19: mol_type = other RNA
aacagaaagaagaaagtgt

SEQ ID NO: 201 - RNA, 19 nt, synthetic construct
  source 1..19: mol_type = other RNA
cctctgaagaggggctggg

SEQ ID NO: 202 - RNA, 19 nt, synthetic construct
  source 1..19: mol_type = other RNA
acagaaagaagaaagtgtg

SEQ ID NO: 203 - RNA, 19 nt, synthetic construct
  source 1..19: mol_type = other RNA
ctctgaagaggggctggga

SEQ ID NO: 204 - RNA, 19 nt, synthetic construct
  source 1..19: mol_type = other RNA
cagaaagaagaaagtgtgg

SEQ ID NO: 205 - RNA, 19 nt, synthetic construct
  source 1..19: mol_type = other RNA
tctgaagaggggctgggaa

SEQ ID NO: 206 - RNA, 19 nt, synthetic construct
  source 1..19: mol_type = other RNA
agaaagaagaaagtgtggg

SEQ ID NO: 207 - RNA, 19 nt, synthetic construct
  source 1..19: mol_type = other RNA
ctgaagaggggctgggaaa

SEQ ID NO: 208 - RNA, 19 nt, synthetic construct
  source 1..19: mol_type = other RNA
gaaagaagaaagtgtggga

SEQ ID NO: 209 - RNA, 19 nt, synthetic construct
  source 1..19: mol_type = other RNA
tgaagaggggctgggaaag

SEQ ID NO: 210 - RNA, 19 nt, synthetic construct
  source 1..19: mol_type = other RNA
aaagaagaaagtgtgggat

SEQ ID NO: 211 - RNA, 19 nt, synthetic construct
  source 1..19: mol_type = other RNA
gaagaggggctgggaaagg

SEQ ID NO: 212 - RNA, 19 nt, synthetic construct
  source 1..19: mol_type = other RNA
aagaagaaagtgtgggatt

SEQ ID NO: 213 - RNA, 19 nt, synthetic construct
  source 1..19: mol_type = other RNA
aagaggggctgggaaaggt

SEQ ID NO: 214 - RNA, 19 nt, synthetic construct
  source 1..19: mol_type = other RNA
agaagaaagtgtgggatta

SEQ ID NO: 215 - RNA, 19 nt, synthetic construct
  source 1..19: mol_type = other RNA
agaggggctgggaaaggtt

SEQ ID NO: 216 - RNA, 19 nt, synthetic construct
  source 1..19: mol_type = other RNA
gaagaaagtgtgggattat

SEQ ID NO: 217 - RNA, 19 nt, synthetic construct
  source 1..19: mol_type = other RNA
gaggggctgggaaaggttg

SEQ ID NO: 218 - RNA, 19 nt, synthetic construct
  source 1..19: mol_type = other RNA
aagaaagtgtgggattata

SEQ ID NO: 219 - RNA, 19 nt, synthetic construct
  source 1..19: mol_type = other RNA
aggggctgggaaaggttgg

SEQ ID NO: 220 - RNA, 19 nt, synthetic construct
  source 1..19: mol_type = other RNA
agaaagtgtgggattataa

SEQ ID NO: 221 - RNA, 19 nt, synthetic construct
  source 1..19: mol_type = other RNA
ggggctgggaaaggttggc

SEQ ID NO: 222 - RNA, 19 nt, synthetic construct
  source 1..19: mol_type = other RNA
gaaagtgtgggattataat

SEQ ID NO: 223 - RNA, 19 nt, synthetic construct
  source 1..19: mol_type = other RNA
gggctgggaaaggttggct

SEQ ID NO: 224 - RNA, 19 nt, synthetic construct
  source 1..19: mol_type = other RNA
aaagtgtgggattataatt

SEQ ID NO: 225 - RNA, 19 nt, synthetic construct
  source 1..19: mol_type = other RNA
ggctgggaaaggttggctg

SEQ ID NO: 226 - RNA, 19 nt, synthetic construct
  source 1..19: mol_type = other RNA
aagtgtgggattataatta

SEQ ID NO: 227 - RNA, 19 nt, synthetic construct
  source 1..19: mol_type = other RNA
gctgggaaaggttggctgt

SEQ ID NO: 228 - RNA, 19 nt, synthetic construct
  source 1..19: mol_type = other RNA
agtgtgggattataattat

SEQ ID NO: 229 - RNA, 19 nt, synthetic construct
  source 1..19: mol_type = other RNA
ctgggaaaggttggctgtg

SEQ ID NO: 230 - RNA, 19 nt, synthetic construct
  source 1..19: mol_type = other RNA
gtgtgggattataattatg

SEQ ID NO: 231 - RNA, 19 nt, synthetic construct
  source 1..19: mol_type = other RNA
tgggaaaggttggctgtgt

SEQ ID NO: 232 - RNA, 19 nt, synthetic construct
  source 1..19: mol_type = other RNA
tgtgggattataattatga

SEQ ID NO: 233 - RNA, 19 nt, synthetic construct
  source 1..19: mol_type = other RNA
gggaaaggttggctgtgtc

SEQ ID NO: 234 - RNA, 19 nt, synthetic construct
  source 1..19: mol_type = other RNA
gtgggattataattatgat

SEQ ID NO: 235 - RNA, 19 nt, synthetic construct
  source 1..19: mol_type = other RNA
ggaaaggttggctgtgtcc

SEQ ID NO: 236 - RNA, 19 nt, synthetic construct
  source 1..19: mol_type = other RNA
tgggattataattatgatg

SEQ ID NO: 237 - RNA, 19 nt, synthetic construct
  source 1..19: mol_type = other RNA
gaaaggttggctgtgtccc

SEQ ID NO: 238 - RNA, 19 nt, synthetic construct
  source 1..19: mol_type = other RNA
gggattataattatgatga

SEQ ID NO: 239 - RNA, 19 nt, synthetic construct
  source 1..19: mol_type = other RNA
aaaggttggctgtgtccct

SEQ ID NO: 240 - RNA, 19 nt, synthetic construct
  source 1..19: mol_type = other RNA
ggattataattatgatgat

SEQ ID NO: 241 - RNA, 19 nt, synthetic construct
  source 1..19: mol_type = other RNA
aaggttggctgtgtccctt

SEQ ID NO: 242 - RNA, 19 nt, synthetic construct
  source 1..19: mol_type = other RNA
gattataattatgatgatg

SEQ ID NO: 243 - RNA, 19 nt, synthetic construct
  source 1..19: mol_type = other RNA
aggttggctgtgtcccttc

SEQ ID NO: 244 - RNA, 19 nt, synthetic construct
  source 1..19: mol_type = other RNA
attataattatgatgatga

SEQ ID NO: 245 - RNA, 19 nt, synthetic construct
  source 1..19: mol_type = other RNA
ggttggctgtgtcccttcc

SEQ ID NO: 246 - RNA, 19 nt, synthetic construct
  source 1..19: mol_type = other RNA
ttataattatgatgatgaa

SEQ ID NO: 247 - RNA, 19 nt, synthetic construct
  source 1..19: mol_type = other RNA
gttggctgtgtcccttccc

SEQ ID NO: 248 - RNA, 19 nt, synthetic construct
  source 1..19: mol_type = other RNA
tataattatgatgatgaaa

SEQ ID NO: 249 - RNA, 19 nt, synthetic construct
  source 1..19: mol_type = other RNA
ttggctgtgtcccttcccc

SEQ ID NO: 250 - RNA, 19 nt, synthetic construct
  source 1..19: mol_type = other RNA
ataattatgatgatgaaag

SEQ ID NO: 251 - RNA, 19 nt, synthetic construct
  source 1..19: mol_type = other RNA
tggctgtgtcccttccccg

SEQ ID NO: 252 - RNA, 19 nt, synthetic construct
  source 1..19: mol_type = other RNA
taattatgatgatgaaagt

SEQ ID NO: 253 - RNA, 19 nt, synthetic construct
  source 1..19: mol_type = other RNA
ggctgtgtcccttccccgc

SEQ ID NO: 254 - RNA, 19 nt, synthetic construct
  source 1..19: mol_type = other RNA
aattatgatgatgaaagtg

SEQ ID NO: 255 - RNA, 19 nt, synthetic construct
  source 1..19: mol_type = other RNA
gctgtgtcccttccccgct

SEQ ID NO: 256 - RNA, 19 nt, synthetic construct
  source 1..19: mol_type = other RNA
attatgatgatgaaagtga

SEQ ID NO: 257 - RNA, 19 nt, synthetic construct
  source 1..19: mol_type = other RNA
ctgtgtcccttccccgctg

SEQ ID NO: 258 - RNA, 19 nt, synthetic construct
  source 1..19: mol_type = other RNA
ttatgatgatgaaagtgat

SEQ ID NO: 259 - RNA, 19 nt, synthetic construct
  source 1..19: mol_type = other RNA
tgtgtcccttccccgctgg

SEQ ID NO: 260 - RNA, 19 nt, synthetic construct
  source 1..19: mol_type = other RNA
tatgatgatgaaagtgata

SEQ ID NO: 261 - RNA, 19 nt, synthetic construct
  source 1..19: mol_type = other RNA
gtgtcccttccccgctggc

SEQ ID NO: 262 - RNA, 19 nt, synthetic construct
  source 1..19: mol_type = other RNA
atgatgatgaaagtgatag

SEQ ID NO: 263 - RNA, 19 nt, synthetic construct
  source 1..19: mol_type = other RNA
tgtcccttccccgctggcc

SEQ ID NO: 264 - RNA, 19 nt, synthetic construct
  source 1..19: mol_type = other RNA
tgatgatgaaagtgatagc

SEQ ID NO: 265 - RNA, 19 nt, synthetic construct
  source 1..19: mol_type = other RNA
gtcccttccccgctggcca

SEQ ID NO: 266 - RNA, 19 nt, synthetic construct
  source 1..19: mol_type = other RNA
gatgatgaaagtgatagcg

SEQ ID NO: 267 - RNA, 19 nt, synthetic construct
  source 1..19: mol_type = other RNA
tcccttccccgctggccag

SEQ ID NO: 268 - RNA, 19 nt, synthetic construct
  source 1..19: mol_type = other RNA
atgatgaaagtgatagcga

SEQ ID NO: 269 - RNA, 19 nt, synthetic construct
  source 1..19: mol_type = other RNA
cccttccccgctggccagc

SEQ ID NO: 270 - RNA, 19 nt, synthetic construct
  source 1..19: mol_type = other RNA
tgatgaaagtgatagcgat

SEQ ID NO: 271 - RNA, 19 nt, synthetic construct
  source 1..19: mol_type = other RNA
ccttccccgctggccagca

SEQ ID NO: 272 - RNA, 19 nt, synthetic construct
  source 1..19: mol_type = other RNA
gatgaaagtgatagcgata

SEQ ID NO: 273 - RNA, 19 nt, synthetic construct
  source 1..19: mol_type = other RNA
cttccccgctggccagcaa

SEQ ID NO: 274 - RNA, 19 nt, synthetic construct
  source 1..19: mol_type = other RNA
atgaaagtgatagcgatac

SEQ ID NO: 275 - RNA, 19 nt, synthetic construct
  source 1..19: mol_type = other RNA
ttccccgctggccagcaaa

SEQ ID NO: 276 - RNA, 19 nt, synthetic construct
  source 1..19: mol_type = other RNA
tgaaagtgatagcgatact

SEQ ID NO: 277 - RNA, 19 nt, synthetic construct
  source 1..19: mol_type = other RNA
tccccgctggccagcaaat

SEQ ID NO: 278 - RNA, 19 nt, synthetic construct
  source 1..19: mol_type = other RNA
gaaagtgatagcgatactg

SEQ ID NO: 279 - RNA, 19 nt, synthetic construct
  source 1..19: mol_type = other RNA
ccccgctggccagcaaatg

SEQ ID NO: 280 - RNA, 19 nt, synthetic construct
  source 1..19: mol_type = other RNA
aaagtgatagcgatactga

SEQ ID NO: 281 - RNA, 19 nt, synthetic construct
  source 1..19: mol_type = other RNA
cccgctggccagcaaatgg

SEQ ID NO: 282 - RNA, 19 nt, synthetic construct
  source 1..19: mol_type = other RNA
aagtgatagcgatactgag

SEQ ID NO: 283 - RNA, 19 nt, synthetic construct
  source 1..19: mol_type = other RNA
ccgctggccagcaaatggt

SEQ ID NO: 284 - RNA, 19 nt, synthetic construct
  source 1..19: mol_type = other RNA
agtgatagcgatactgagg

SEQ ID NO: 285 - RNA, 19 nt, synthetic construct
  source 1..19: mol_type = other RNA
cgctggccagcaaatggtt

SEQ ID NO: 286 - RNA, 19 nt, synthetic construct
  source 1..19: mol_type = other RNA
gtgatagcgatactgaggc

SEQ ID NO: 287 - RNA, 19 nt, synthetic construct
  source 1..19: mol_type = other RNA
gctggccagcaaatggttt

SEQ ID NO: 288 - RNA, 19 nt, synthetic construct
  source 1..19: mol_type = other RNA
tgatagcgatactgaggca

SEQ ID NO: 289 - RNA, 19 nt, synthetic construct
  source 1..19: mol_type = other RNA
ctggccagcaaatggtttg

SEQ ID NO: 290 - RNA, 19 nt, synthetic construct
  source 1..19: mol_type = other RNA
gatagcgatactgaggcag

SEQ ID NO: 291 - RNA, 19 nt, synthetic construct
  source 1..19: mol_type = other RNA
tggccagcaaatggtttga

SEQ ID NO: 292 - RNA, 19 nt, synthetic construct
  source 1..19: mol_type = other RNA
atagcgatactgaggcagc

SEQ ID NO: 293 - RNA, 19 nt, synthetic construct
  source 1..19: mol_type = other RNA
ggccagcaaatggtttgat

SEQ ID NO: 294 - RNA, 19 nt, synthetic construct
  source 1..19: mol_type = other RNA
tagcgatactgaggcagcg

SEQ ID NO: 295 - RNA, 19 nt, synthetic construct
  source 1..19: mol_type = other RNA
gccagcaaatggtttgatt

SEQ ID NO: 296 - RNA, 19 nt, synthetic construct
  source 1..19: mol_type = other RNA
agcgatactgaggcagcgc

SEQ ID NO: 297 - RNA, 19 nt, synthetic construct
  source 1..19: mol_type = other RNA
ccagcaaatggtttgattg

SEQ ID NO: 298 - RNA, 19 nt, synthetic construct
  source 1..19: mol_type = other RNA
gcgatactgaggcagcgcc

SEQ ID NO: 299 - RNA, 19 nt, synthetic construct
  source 1..19: mol_type = other RNA
cagcaaatggtttgattgc

SEQ ID NO: 300 - RNA, 19 nt, synthetic construct
  source 1..19: mol_type = other RNA
cgatactgaggcagcgccc

SEQ ID NO: 301 - RNA, 19 nt, synthetic construct
  source 1..19: mol_type = other RNA
agcaaatggtttgattgca

SEQ ID NO: 302 - RNA, 19 nt, synthetic construct
  source 1..19: mol_type = other RNA
gatactgaggcagcgccca

SEQ ID NO: 303 - RNA, 19 nt, synthetic construct
  source 1..19: mol_type = other RNA
gcaaatggtttgattgcac

SEQ ID NO: 304 - RNA, 19 nt, synthetic construct
  source 1..19: mol_type = other RNA
atactgaggcagcgcccag

SEQ ID NO: 305 - RNA, 19 nt, synthetic construct
  source 1..19: mol_type = other RNA
caaatggtttgattgcaca

SEQ ID NO: 306 - RNA, 19 nt, synthetic construct
  source 1..19: mol_type = other RNA
tactgaggcagcgcccagg

SEQ ID NO: 307 - RNA, 19 nt, synthetic construct
  source 1..19: mol_type = other RNA
aaatggtttgattgcacat

SEQ ID NO: 308 - RNA, 19 nt, synthetic construct
  source 1..19: mol_type = other RNA
actgaggcagcgcccagga

SEQ ID NO: 309 - RNA, 19 nt, synthetic construct
  source 1..19: mol_type = other RNA
aatggtttgattgcacatt

SEQ ID NO: 310 - RNA, 19 nt, synthetic construct
  source 1..19: mol_type = other RNA
ctgaggcagcgcccaggac

SEQ ID NO: 311 - RNA, 19 nt, synthetic construct
  source 1..19: mol_type = other RNA
atggtttgattgcacatta

SEQ ID NO: 312 - RNA, 19 nt, synthetic construct
  source 1..19: mol_type = other RNA
tgaggcagcgcccaggaca

SEQ ID NO: 313 - RNA, 19 nt, synthetic construct
  source 1..19: mol_type = other RNA
tggtttgattgcacattat

SEQ ID NO: 314 - RNA, 19 nt, synthetic construct
  source 1..19: mol_type = other RNA
gaggcagcgcccaggacaa

SEQ ID NO: 315 - RNA, 19 nt, synthetic construct
  source 1..19: mol_type = other RNA
ggtttgattgcacattatc

SEQ ID NO: 316 - RNA, 19 nt, synthetic construct
  source 1..19: mol_type = other RNA
aggcagcgcccaggacaag

SEQ ID NO: 317 - RNA, 19 nt, synthetic construct
  source 1..19: mol_type = other RNA
gtttgattgcacattatca

SEQ ID NO: 318 - RNA, 19 nt, synthetic construct
  source 1..19: mol_type = other RNA
ggcagcgcccaggacaagt

SEQ ID NO: 319 - RNA, 19 nt, synthetic construct
  source 1..19: mol_type = other RNA
tttgattgcacattatcag

SEQ ID NO: 320 - RNA, 19 nt, synthetic construct
  source 1..19: mol_type = other RNA
gcagcgcccaggacaagtg

SEQ ID NO: 321 - RNA, 19 nt, synthetic construct
  source 1..19: mol_type = other RNA
ttgattgcacattatcagg

SEQ ID NO: 322 - RNA, 19 nt, synthetic construct
  source 1..19: mol_type = other RNA
cagcgcccaggacaagtgg

SEQ ID NO: 323 - RNA, 19 nt, synthetic construct
  source 1..19: mol_type = other RNA
tgattgcacattatcagga

SEQ ID NO: 324 - RNA, 19 nt, synthetic construct
  source 1..19: mol_type = other RNA
agcgcccaggacaagtggc

SEQ ID NO: 325 - RNA, 19 nt, synthetic construct
  source 1..19: mol_type = other RNA
gattgcacattatcaggat

SEQ ID NO: 326 - RNA, 19 nt, synthetic construct
  source 1..19: mol_type = other RNA
gcgcccaggacaagtggcg

SEQ ID NO: 327 - RNA, 19 nt, synthetic construct
  source 1..19: mol_type = other RNA
attgcacattatcaggatc

SEQ ID NO: 328 - RNA, 19 nt, synthetic construct
  source 1..19: mol_type = other RNA
cgcccaggacaagtggcgg

SEQ ID NO: 329 - RNA, 19 nt, synthetic construct
  source 1..19: mol_type = other RNA
ttgcacattatcaggatcc

SEQ ID NO: 330 - RNA, 19 nt, synthetic construct
  source 1..19: mol_type = other RNA
gcccaggacaagtggcggt

SEQ ID NO: 331 - RNA, 19 nt, synthetic construct
  source 1..19: mol_type = other RNA
tgcacattatcaggatcct

SEQ ID NO: 332 - RNA, 19 nt, synthetic construct
  source 1..19: mol_type = other RNA
cccaggacaagtggcggtg

SEQ ID NO: 333 - RNA, 19 nt, synthetic construct
  source 1..19: mol_type = other RNA
gcacattatcaggatcctc

SEQ ID NO: 334 - RNA, 19 nt, synthetic construct
  source 1..19: mol_type = other RNA
ccaggacaagtggcggtgg

SEQ ID NO: 335 - RNA, 19 nt, synthetic construct
  source 1..19: mol_type = other RNA
cacattatcaggatcctct

SEQ ID NO: 336 - RNA, 19 nt, synthetic construct
  source 1..19: mol_type = other RNA
caggacaagtggcggtggc

SEQ ID NO: 337 - RNA, 19 nt, synthetic construct
  source 1..19: mol_type = other RNA
acattatcaggatcctctg

SEQ ID NO: 338 - RNA, 19 nt, synthetic construct
  source 1..19: mol_type = other RNA
aggacaagtggcggtggct

SEQ ID NO: 339 - RNA, 19 nt, synthetic construct
  source 1..19: mol_type = other RNA
cattatcaggatcctctgg

SEQ ID NO: 340 - RNA, 19 nt, synthetic construct
  source 1..19: mol_type = other RNA
ggacaagtggcggtggcta

SEQ ID NO: 341 - RNA, 19 nt, synthetic construct
  source 1..19: mol_type = other RNA
attatcaggatcctctggg

SEQ ID NO: 342 - RNA, 19 nt, synthetic construct
  source 1..19: mol_type = other RNA
gacaagtggcggtggctat

SEQ ID NO: 343 - RNA, 19 nt, synthetic construct
  source 1..19: mol_type = other RNA
ttatcaggatcctctgggt

SEQ ID NO: 344 - RNA, 19 nt, synthetic construct
  source 1..19: mol_type = other RNA
acaagtggcggtggctata

SEQ ID NO: 345 - RNA, 19 nt, synthetic construct
  source 1..19: mol_type = other RNA
tatcaggatcctctgggtc

SEQ ID NO: 346 - RNA, 19 nt, synthetic construct
  source 1..19: mol_type = other RNA
caagtggcggtggctatac

SEQ ID NO: 347 - RNA, 19 nt, synthetic construct
  source 1..19: mol_type = other RNA
atcaggatcctctgggtca

SEQ ID NO: 348 - RNA, 19 nt, synthetic construct
  source 1..19: mol_type = other RNA
aagtggcggtggctatacc

SEQ ID NO: 349 - RNA, 19 nt, synthetic construct
  source 1..19: mol_type = other RNA
tcaggatcctctgggtcaa

SEQ ID NO: 350 - RNA, 19 nt, synthetic construct
  source 1..19: mol_type = other RNA
agtggcggtggctatacca

SEQ ID NO: 351 - RNA, 19 nt, synthetic construct
  source 1..19: mol_type = other RNA
caggatcctctgggtcaac

SEQ ID NO: 352 - RNA, 19 nt, synthetic construct
  source 1..19: mol_type = other RNA
gtggcggtggctataccat

SEQ ID NO: 353 - RNA, 19 nt, synthetic construct
  source 1..19: mol_type = other RNA
aggatcctctgggtcaacc

SEQ ID NO: 354 - RNA, 19 nt, synthetic construct
  source 1..19: mol_type = other RNA
tggcggtggctataccatg

SEQ ID NO: 355 - RNA, 19 nt, synthetic construct
  source 1..19: mol_type = other RNA
ggatcctctgggtcaacca

SEQ ID NO: 356 - RNA, 19 nt, synthetic construct
  source 1..19: mol_type = other RNA
ggcggtggctataccatgc

SEQ ID NO: 357 - RNA, 19 nt, synthetic construct
  source 1..19: mol_type = other RNA
gatcctctgggtcaaccat

SEQ ID NO: 358 - RNA, 19 nt, synthetic construct
  source 1..19: mol_type = other RNA
gcggtggctataccatgca

SEQ ID NO: 359 - RNA, 19 nt, synthetic construct
  source 1..19: mol_type = other RNA
atcctctgggtcaaccatc

SEQ ID NO: 360 - RNA, 19 nt, synthetic construct
  source 1..19: mol_type = other RNA
cggtggctataccatgcat

SEQ ID NO: 361 - RNA, 19 nt, synthetic construct
  source 1..19: mol_type = other RNA
tcctctgggtcaaccatct

SEQ ID NO: 362 - RNA, 19 nt, synthetic construct
  source 1..19: mol_type = other RNA
ggtggctataccatgcatg

SEQ ID NO: 363 - RNA, 19 nt, synthetic construct
  source 1..19: mol_type = other RNA
cctctgggtcaaccatctc

SEQ ID NO: 364 - RNA, 19 nt, synthetic construct
  source 1..19: mol_type = other RNA
gtggctataccatgcatgg

SEQ ID NO: 365 - RNA, 19 nt, synthetic construct
  source 1..19: mol_type = other RNA
ctctgggtcaaccatctct

SEQ ID NO: 366 - RNA, 19 nt, synthetic construct
  source 1..19: mol_type = other RNA
tggctataccatgcatgga

SEQ ID NO: 367 - RNA, 19 nt, synthetic construct
  source 1..19: mol_type = other RNA
tctgggtcaaccatctctt

SEQ ID NO: 368 - RNA, 19 nt, synthetic construct
  source 1..19: mol_type = other RNA
ggctataccatgcatggac

SEQ ID NO: 369 - RNA, 19 nt, synthetic construct
  source 1..19: mol_type = other RNA
ctgggtcaaccatctcttc

SEQ ID NO: 370 - RNA, 19 nt, synthetic construct
  source 1..19: mol_type = other RNA
gctataccatgcatggact

SEQ ID NO: 371 - RNA, 19 nt, synthetic construct
  source 1..19: mol_type = other RNA
tgggtcaaccatctcttcc

SEQ ID NO: 372 - RNA, 19 nt, synthetic construct
  source 1..19: mol_type = other RNA
ctataccatgcatggactg

SEQ ID NO: 373 - RNA, 19 nt, synthetic construct
  source 1..19: mol_type = other RNA
gggtcaaccatctcttcca

SEQ ID NO: 374 - RNA, 19 nt, synthetic construct
  source 1..19: mol_type = other RNA
tataccatgcatggactga

SEQ ID NO: 375 - RNA, 19 nt, synthetic construct
  source 1..19: mol_type = other RNA
ggtcaaccatctcttccag

SEQ ID NO: 376 - RNA, 19 nt, synthetic construct
  source 1..19: mol_type = other RNA
ataccatgcatggactgac

SEQ ID NO: 377 - RNA, 19 nt, synthetic construct
  source 1..19: mol_type = other RNA
gtcaaccatctcttccaga

SEQ ID NO: 378 - RNA, 19 nt, synthetic construct
  source 1..19: mol_type = other RNA
taccatgcatggactgact

SEQ ID NO: 379 - RNA, 19 nt, synthetic construct
  source 1..19: mol_type = other RNA
tcaaccatctcttccagat

SEQ ID NO: 380 - RNA, 19 nt, synthetic construct
  source 1..19: mol_type = other RNA
accatgcatggactgactg

SEQ ID NO: 381 - RNA, 19 nt, synthetic construct
  source 1..19: mol_type = other RNA
caaccatctcttccagatg

SEQ ID NO: 382 - RNA, 19 nt, synthetic construct
  source 1..19: mol_type = other RNA
ccatgcatggactgactgt

SEQ ID NO: 383 - RNA, 19 nt, synthetic construct
  source 1..19: mol_type = other RNA
aaccatctcttccagatga

SEQ ID NO: 384 - RNA, 19 nt, synthetic construct
  source 1..19: mol_type = other RNA
catgcatggactgactgtc

SEQ ID NO: 385 - RNA, 19 nt, synthetic construct
  source 1..19: mol_type = other RNA
accatctcttccagatgag

SEQ ID NO: 386 - RNA, 19 nt, synthetic construct
  source 1..19: mol_type = other RNA
atgcatggactgactgtca

SEQ ID NO: 387 - RNA, 19 nt, synthetic construct
  source 1..19: mol_type = other RNA
ccatctcttccagatgaga

SEQ ID NO: 388 - RNA, 19 nt, synthetic construct
  source 1..19: mol_type = other RNA
tgcatggactgactgtcag

SEQ ID NO: 389 - RNA, 19 nt, synthetic construct
  source 1..19: mol_type = other RNA
catctcttccagatgagac

SEQ ID NO: 390 - RNA, 19 nt, synthetic construct
  source 1..19: mol_type = other RNA
gcatggactgactgtcagg

SEQ ID NO: 391 - RNA, 19 nt, synthetic construct
  source 1..19: mol_type = other RNA
atctcttccagatgagacg

SEQ ID NO: 392 - RNA, 19 nt, synthetic construct
  source 1..19: mol_type = other RNA
catggactgactgtcaggc

SEQ ID NO: 393 - RNA, 19 nt, synthetic construct
  source 1..19: mol_type = other RNA
tctcttccagatgagacga

SEQ ID NO: 394 - RNA, 19 nt, synthetic construct
  source 1..19: mol_type = other RNA
atggactgactgtcaggcc

SEQ ID NO: 395 - RNA, 19 nt, synthetic construct
  source 1..19: mol_type = other RNA
ctcttccagatgagacgat

SEQ ID NO: 396 - RNA, 19 nt, synthetic construct
  source 1..19: mol_type = other RNA
tggactgactgtcaggcct

SEQ ID NO: 397 - RNA, 19 nt, synthetic construct
  source 1..19: mol_type = other RNA
tcttccagatgagacgata

SEQ ID NO: 398 - RNA, 19 nt, synthetic construct
  source 1..19: mol_type = other RNA
ggactgactgtcaggcctc

SEQ ID NO: 399 - RNA, 19 nt, synthetic construct
  source 1..19: mol_type = other RNA
cttccagatgagacgatag

SEQ ID NO: 400 - RNA, 19 nt, synthetic construct
  source 1..19: mol_type = other RNA
gactgactgtcaggcctct

SEQ ID NO: 401 - RNA, 19 nt, synthetic construct
  source 1..19: mol_type = other RNA
ttccagatgagacgatagc

SEQ ID NO: 402 - RNA, 19 nt, synthetic construct
  source 1..19: mol_type = other RNA
actgactgtcaggcctctg

SEQ ID NO: 403 - RNA, 19 nt, synthetic construct
  source 1..19: mol_type = other RNA
tccagatgagacgatagca

SEQ ID NO: 404 - RNA, 19 nt, synthetic construct
  source 1..19: mol_type = other RNA
ctgactgtcaggcctctgg

SEQ ID NO: 405 - RNA, 19 nt, synthetic construct
  source 1..19: mol_type = other RNA
ccagatgagacgatagcat

SEQ ID NO: 406 - RNA, 19 nt, synthetic construct
  source 1..19: mol_type = other RNA
tgactgtcaggcctctggg

SEQ ID NO: 407 - RNA, 19 nt, synthetic construct
  source 1..19: mol_type = other RNA
cagatgagacgatagcatc

SEQ ID NO: 408 - RNA, 19 nt, synthetic construct
  source 1..19: mol_type = other RNA
gactgtcaggcctctgggt

SEQ ID NO: 409 - RNA, 19 nt, synthetic construct
  source 1..19: mol_type = other RNA
agatgagacgatagcatca

SEQ ID NO: 410 - RNA, 19 nt, synthetic construct
  source 1..19: mol_type = other RNA
actgtcaggcctctgggtc

SEQ ID NO: 411 - RNA, 19 nt, synthetic construct
  source 1..19: mol_type = other RNA
gatgagacgatagcatcag

SEQ ID NO: 412 - RNA, 19 nt, synthetic construct
  source 1..19: mol_type = other RNA
ctgtcaggcctctgggtca

SEQ ID NO: 413 - RNA, 19 nt, synthetic construct
  source 1..19: mol_type = other RNA
atgagacgatagcatcaga

SEQ ID NO: 414 - RNA, 19 nt, synthetic construct
  source 1..19: mol_type = other RNA
tgtcaggcctctgggtcag

SEQ ID NO: 415 - RNA, 19 nt, synthetic construct
  source 1..19: mol_type = other RNA
tgagacgatagcatcagag

SEQ ID NO: 416 - RNA, 19 nt, synthetic construct
  source 1..19: mol_type = other RNA
gtcaggcctctgggtcagg

SEQ ID NO: 417 - RNA, 19 nt, synthetic construct
  source 1..19: mol_type = other RNA
gagacgatagcatcagagg

SEQ ID NO: 418 - RNA, 19 nt, synthetic construct
  source 1..19: mol_type = other RNA
tcaggcctctgggtcaggc

SEQ ID NO: 419 - RNA, 19 nt, synthetic construct
  source 1..19: mol_type = other RNA
agacgatagcatcagaggg

SEQ ID NO: 420 - RNA, 19 nt, synthetic construct
  source 1..19: mol_type = other RNA
caggcctctgggtcaggcc

SEQ ID NO: 421 - RNA, 19 nt, synthetic construct
  source 1..19: mol_type = other RNA
gacgatagcatcagagggg

SEQ ID NO: 422 - RNA, 19 nt, synthetic construct
  source 1..19: mol_type = other RNA
aggcctctgggtcaggcct

SEQ ID NO: 423 - RNA, 19 nt, synthetic construct
  source 1..19: mol_type = other RNA
acgatagcatcagaggggc

SEQ ID NO: 424 - RNA, 19 nt, synthetic construct
  source 1..19: mol_type = other RNA
ggcctctgggtcaggcctc

SEQ ID NO: 425 - RNA, 19 nt, synthetic construct
  source 1..19: mol_type = other RNA
cgatagcatcagaggggct

SEQ ID NO: 426 - RNA, 19 nt, synthetic construct
  source 1..19: mol_type = other RNA
gcctctgggtcaggcctct

SEQ ID NO: 427 - RNA, 19 nt, synthetic construct
  source 1..19: mol_type = other RNA
gatagcatcagaggggctt

SEQ ID NO: 428 - RNA, 19 nt, synthetic construct
  source 1..19: mol_type = other RNA
cctctgggtcaggcctctg

SEQ ID NO: 429 - RNA, 19 nt, synthetic construct
  source 1..19: mol_type = other RNA
atagcatcagaggggcttc

SEQ ID NO: 430 - RNA, 19 nt, synthetic construct
  source 1..19: mol_type = other RNA
ctctgggtcaggcctctgc

SEQ ID NO: 431 - RNA, 19 nt, synthetic construct
  source 1..19: mol_type = other RNA
tagcatcagaggggcttct

SEQ ID NO: 432 - RNA, 19 nt, synthetic construct
  source 1..19: mol_type = other RNA
tctgggtcaggcctctgcc

SEQ ID NO: 433 - RNA, 19 nt, synthetic construct
  source 1..19: mol_type = other RNA
agcatcagaggggcttcta

SEQ ID NO: 434 - RNA, 19 nt, synthetic construct
  source 1..19: mol_type = other RNA
ctgggtcaggcctctgcca

SEQ ID NO: 435 - RNA, 19 nt, synthetic construct
  source 1..19: mol_type = other RNA
gcatcagaggggcttctaa

SEQ ID NO: 436 - RNA, 19 nt, synthetic construct
  source 1..19: mol_type = other RNA
tgggtcaggcctctgccac

SEQ ID NO: 437 - RNA, 19 nt, synthetic construct
  source 1..19: mol_type = other RNA
catcagaggggcttctaag

SEQ ID NO: 438 - RNA, 19 nt, synthetic construct
  source 1..19: mol_type = other RNA
gggtcaggcctctgccacc

SEQ ID NO: 439 - RNA, 19 nt, synthetic construct
  source 1..19: mol_type = other RNA
atcagaggggcttctaagt

SEQ ID NO: 440 - RNA, 19 nt, synthetic construct
  source 1..19: mol_type = other RNA
ggtcaggcctctgccacct

SEQ ID NO: 441 - RNA, 19 nt, synthetic construct
  source 1..19: mol_type = other RNA
tcagaggggcttctaagtc

SEQ ID NO: 442 - RNA, 19 nt, synthetic construct
  source 1..19: mol_type = other RNA
gtcaggcctctgccacctc

SEQ ID NO: 443 - RNA, 19 nt, synthetic construct
  source 1..19: mol_type = other RNA
cagaggggcttctaagtcg

SEQ ID NO: 444 - RNA, 19 nt, synthetic construct
  source 1..19: mol_type = other RNA
tcaggcctctgccacctct

SEQ ID NO: 445 - RNA, 19 nt, synthetic construct
  source 1..19: mol_type = other RNA
agaggggcttctaagtcgt

SEQ ID NO: 446 - RNA, 19 nt, synthetic construct
  source 1..19: mol_type = other RNA
caggcctctgccacctcta

SEQ ID NO: 447 - RNA, 19 nt, synthetic construct
  source 1..19: mol_type = other RNA
gaggggcttctaagtcgtc

SEQ ID NO: 448 - RNA, 19 nt, synthetic construct
  source 1..19: mol_type = other RNA
aggcctctgccacctctac

SEQ ID NO: 449 - RNA, 19 nt, synthetic construct
  source 1..19: mol_type = other RNA
aggggcttctaagtcgtca

SEQ ID NO: 450 - RNA, 19 nt, synthetic construct
  source 1..19: mol_type = other RNA
ggcctctgccacctctaca

SEQ ID NO: 451 - RNA, 19 nt, synthetic construct
  source 1..19: mol_type = other RNA
ggggcttctaagtcgtcac

SEQ ID NO: 452 - RNA, 19 nt, synthetic construct
  source 1..19: mol_type = other RNA
gcctctgccacctctacag

SEQ ID NO: 453 - RNA, 19 nt, synthetic construct
  source 1..19: mol_type = other RNA
gggcttctaagtcgtcact

SEQ ID NO: 454 - RNA, 19 nt, synthetic construct
  source 1..19: mol_type = other RNA
cctctgccacctctacaga

SEQ ID NO: 455 - RNA, 19 nt, synthetic construct
  source 1..19: mol_type = other RNA
ggcttctaagtcgtcactg

SEQ ID NO: 456 - RNA, 19 nt, synthetic construct
  source 1..19: mol_type = other RNA
ctctgccacctctacagaa

SEQ ID NO: 457 - RNA, 19 nt, synthetic construct
  source 1..19: mol_type = other RNA
gcttctaagtcgtcactgt

SEQ ID NO: 458 - RNA, 19 nt, synthetic construct
  source 1..19: mol_type = other RNA
tctgccacctctacagaat

SEQ ID NO: 459 - RNA, 19 nt, synthetic construct
  source 1..19: mol_type = other RNA
cttctaagtcgtcactgtc

SEQ ID NO: 460 - RNA, 19 nt, synthetic construct
  source 1..19: mol_type = other RNA
ctgccacctctacagaatc

SEQ ID NO: 461 - RNA, 19 nt, synthetic construct
  source 1..19: mol_type = other RNA
ttctaagtcgtcactgtcc

SEQ ID NO: 462 - RNA, 19 nt, synthetic construct
  source 1..19: mol_type = other RNA
tgccacctctacagaatcc

SEQ ID NO: 463 - RNA, 19 nt, synthetic construct
  source 1..19: mol_type = other RNA
tctaagtcgtcactgtcct

SEQ ID NO: 464 - RNA, 19 nt, synthetic construct
  source 1..19: mol_type = other RNA
gccacctctacagaatccc

SEQ ID NO: 465 - RNA, 19 nt, synthetic construct
  source 1..19: mol_type = other RNA
ctaagtcgtcactgtcctc

SEQ ID NO: 466 - RNA, 19 nt, synthetic construct
  source 1..19: mol_type = other RNA
ccacctctacagaatccca

SEQ ID NO: 467 - RNA, 19 nt, synthetic construct
  source 1..19: mol_type = other RNA
taagtcgtcactgtcctcg

SEQ ID NO: 468 - RNA, 19 nt, synthetic construct
  source 1..19: mol_type = other RNA
cacctctacagaatcccag

SEQ ID NO: 469 - RNA, 19 nt, synthetic construct
  source 1..19: mol_type = other RNA
aagtcgtcactgtcctcgt

SEQ ID NO: 470 - RNA, 19 nt, synthetic construct
  source 1..19: mol_type = other RNA
acctctacagaatcccagt

SEQ ID NO: 471 - RNA, 19 nt, synthetic construct
  source 1..19: mol_type = other RNA
agtcgtcactgtcctcgtc

SEQ ID NO: 472 - RNA, 19 nt, synthetic construct
  source 1..19: mol_type = other RNA
cctctacagaatcccagtt

SEQ ID NO: 473 - RNA, 19 nt, synthetic construct
  source 1..19: mol_type = other RNA
gtcgtcactgtcctcgtca

SEQ ID NO: 474 - RNA, 19 nt, synthetic construct
  source 1..19: mol_type = other RNA
ctctacagaatcccagttg

SEQ ID NO: 475 - RNA, 19 nt, synthetic construct
  source 1..19: mol_type = other RNA
tcgtcactgtcctcgtcat

SEQ ID NO: 476 - RNA, 19 nt, synthetic construct
  source 1..19: mol_type = other RNA
tctacagaatcccagttga

SEQ ID NO: 477 - RNA, 19 nt, synthetic construct
  source 1..19: mol_type = other RNA
cgtcactgtcctcgtcatc

SEQ ID NO: 478 - RNA, 19 nt, synthetic construct
  source 1..19: mol_type = other RNA
ctacagaatcccagttgat

SEQ ID NO: 479 - RNA, 19 nt, synthetic construct
  source 1..19: mol_type = other RNA
gtcactgtcctcgtcatca

SEQ ID NO: 480 - RNA, 19 nt, synthetic construct
  source 1..19: mol_type = other RNA
tacagaatcccagttgata

SEQ ID NO: 481 - RNA, 19 nt, synthetic construct
  source 1..19: mol_type = other RNA
tcactgtcctcgtcatcaa

SEQ ID NO: 482 - RNA, 19 nt, synthetic construct
  source 1..19: mol_type = other RNA
acagaatcccagttgatag

SEQ ID NO: 483 - RNA, 19 nt, synthetic construct
  source 1..19: mol_type = other RNA
cactgtcctcgtcatcaag

SEQ ID NO: 484 - RNA, 19 nt, synthetic construct
  source 1..19: mol_type = other RNA
cagaatcccagttgataga

SEQ ID NO: 485 - RNA, 19 nt, synthetic construct
  source 1..19: mol_type = other RNA
actgtcctcgtcatcaaga

SEQ ID NO: 486 - RNA, 19 nt, synthetic construct
  source 1..19: mol_type = other RNA
agaatcccagttgatagac

SEQ ID NO: 487 - RNA, 19 nt, synthetic construct
  source 1..19: mol_type = other RNA
ctgtcctcgtcatcaagaa

SEQ ID NO: 488 - RNA, 19 nt, synthetic construct
  source 1..19: mol_type = other RNA
gaatcccagttgatagacc

SEQ ID NO: 489 - RNA, 19 nt, synthetic construct
  source 1..19: mol_type = other RNA
tgtcctcgtcatcaagaac

SEQ ID NO: 490 - RNA, 19 nt, synthetic construct
  source 1..19: mol_type = other RNA
aatcccagttgatagaccc

SEQ ID NO: 491 - RNA, 19 nt, synthetic construct
  source 1..19: mol_type = other RNA
gtcctcgtcatcaagaact

SEQ ID NO: 492 - RNA, 19 nt, synthetic construct
  source 1..19: mol_type = other RNA
atcccagttgatagacccg

SEQ ID NO: 493 - RNA, 19 nt, synthetic construct
  source 1..19: mol_type = other RNA
tcctcgtcatcaagaactc

SEQ ID NO: 494 - RNA, 19 nt, synthetic construct
  source 1..19: mol_type = other RNA
tcccagttgatagacccgg

SEQ ID NO: 495 - RNA, 19 nt, synthetic construct
  source 1..19: mol_type = other RNA
cctcgtcatcaagaactct

SEQ ID NO: 496 - RNA, 19 nt, synthetic construct
  source 1..19: mol_type = other RNA
cccagttgatagacccgga

SEQ ID NO: 497 - RNA, 19 nt, synthetic construct
  source 1..19: mol_type = other RNA
ctcgtcatcaagaactctc

SEQ ID NO: 498 - RNA, 19 nt, synthetic construct
  source 1..19: mol_type = other RNA
ccagttgatagacccggag

SEQ ID NO: 499 - RNA, 19 nt, synthetic construct
  source 1..19: mol_type = other RNA
tcgtcatcaagaactctca

SEQ ID NO: 500 - RNA, 19 nt, synthetic construct
  source 1..19: mol_type = other RNA
cagttgatagacccggagt

SEQ ID NO: 501 - RNA, 19 nt, synthetic construct
  source 1..19: mol_type = other RNA
cgtcatcaagaactctcaa

SEQ ID NO: 502 - RNA, 19 nt, synthetic construct
  source 1..19: mol_type = other RNA
agttgatagacccggagtc

SEQ ID NO: 503 - RNA, 19 nt, synthetic construct
  source 1..19: mol_type = other RNA
gtcatcaagaactctcaaa

SEQ ID NO: 504 - RNA, 19 nt, synthetic construct
  source 1..19: mol_type = other RNA
gttgatagacccggagtcc

SEQ ID NO: 505 - RNA, 19 nt, synthetic construct
  source 1..19: mol_type = other RNA
tcatcaagaactctcaaaa

SEQ ID NO: 506 - RNA, 19 nt, synthetic construct
  source 1..19: mol_type = other RNA
ttgatagacccggagtccg

SEQ ID NO: 507 - RNA, 19 nt, synthetic construct
  source 1..19: mol_type = other RNA
catcaagaactctcaaaaa

SEQ ID NO: 508 - RNA, 19 nt, synthetic construct
  source 1..19: mol_type = other RNA
tgatagacccggagtccga

SEQ ID NO: 509 - RNA, 19 nt, synthetic construct
  source 1..19: mol_type = other RNA
atcaagaactctcaaaaac

SEQ ID NO: 510 - RNA, 19 nt, synthetic construct
  source 1..19: mol_type = other RNA
gatagacccggagtccgag

SEQ ID NO: 511 - RNA, 19 nt, synthetic construct
  source 1..19: mol_type = other RNA
tcaagaactctcaaaaaca

SEQ ID NO: 512 - RNA, 19 nt, synthetic construct
  source 1..19: mol_type = other RNA
atagacccggagtccgagg

SEQ ID NO: 513 - RNA, 19 nt, synthetic construct
  source 1..19: mol_type = other RNA
caagaactctcaaaaacac

SEQ ID NO: 514 - RNA, 19 nt, synthetic construct
  source 1..19: mol_type = other RNA
tagacccggagtccgagga

SEQ ID NO: 515 - RNA, 19 nt, synthetic construct
  source 1..19: mol_type = other RNA
aagaactctcaaaaacaca

SEQ ID NO: 516 - RNA, 19 nt, synthetic construct
  source 1..19: mol_type = other RNA
agacccggagtccgaggag

SEQ ID NO: 517 - RNA, 19 nt, synthetic construct
  source 1..19: mol_type = other RNA
agaactctcaaaaacacag

SEQ ID NO: 518 - RNA, 19 nt, synthetic construct
  source 1..19: mol_type = other RNA
gacccggagtccgaggagg

SEQ ID NO: 519 - RNA, 19 nt, synthetic construct
  source 1..19: mol_type = other RNA
gaactctcaaaaacacaga

SEQ ID NO: 520 - RNA, 19 nt, synthetic construct
  source 1..19: mol_type = other RNA
acccggagtccgaggagga

SEQ ID NO: 521 - RNA, 19 nt, synthetic construct
  source 1..19: mol_type = other RNA
aactctcaaaaacacagag

SEQ ID NO: 522 - RNA, 19 nt, synthetic construct
  source 1..19: mol_type = other RNA
cccggagtccgaggaggag

SEQ ID NO: 523 - RNA, 19 nt, synthetic construct
  source 1..19: mol_type = other RNA
actctcaaaaacacagagt

SEQ ID NO: 524 - RNA, 19 nt, synthetic construct
  source 1..19: mol_type = other RNA
ccggagtccgaggaggagc

SEQ ID NO: 525 - RNA, 19 nt, synthetic construct
  source 1..19: mol_type = other RNA
ctctcaaaaacacagagtt

SEQ ID NO: 526 - RNA, 19 nt, synthetic construct
  source 1..19: mol_type = other RNA
cggagtccgaggaggagcc

SEQ ID NO: 527 - RNA, 19 nt, synthetic construct
  source 1..19: mol_type = other RNA
tctcaaaaacacagagttt

SEQ ID NO: 528 - RNA, 19 nt, synthetic construct
  source 1..19: mol_type = other RNA
ggagtccgaggaggagcct

SEQ ID NO: 529 - RNA, 19 nt, synthetic construct
  source 1..19: mol_type = other RNA
ctcaaaaacacagagttta

SEQ ID NO: 530 - RNA, 19 nt, synthetic construct
  source 1..19: mol_type = other RNA
gagtccgaggaggagcctg

SEQ ID NO: 531 - RNA, 19 nt, synthetic construct
  source 1..19: mol_type = other RNA
tcaaaaacacagagtttaa

SEQ ID NO: 532 - RNA, 19 nt, synthetic construct
  source 1..19: mol_type = other RNA
agtccgaggaggagcctga

SEQ ID NO: 533 - RNA, 19 nt, synthetic construct
  source 1..19: mol_type = other RNA
caaaaacacagagtttaag

SEQ ID NO: 534 - RNA, 19 nt, synthetic construct
  source 1..19: mol_type = other RNA
gtccgaggaggagcctgac

SEQ ID NO: 535 - RNA, 19 nt, synthetic construct
  source 1..19: mol_type = other RNA
aaaaacacagagtttaagt

SEQ ID NO: 536 - RNA, 19 nt, synthetic construct
  source 1..19: mol_type = other RNA
tccgaggaggagcctgacc

SEQ ID NO: 537 - RNA, 19 nt, synthetic construct
  source 1..19: mol_type = other RNA
aaaacacagagtttaagtc

SEQ ID NO: 538 - RNA, 19 nt, synthetic construct
  source 1..19: mol_type = other RNA
ccgaggaggagcctgacct

SEQ ID NO: 539 - RNA, 19 nt, synthetic construct
  source 1..19: mol_type = other RNA
aaacacagagtttaagtcc

SEQ ID NO: 540 - RNA, 19 nt, synthetic construct
  source 1..19: mol_type = other RNA
cgaggaggagcctgacctg

SEQ ID NO: 541 - RNA, 19 nt, synthetic construct
  source 1..19: mol_type = other RNA
aacacagagtttaagtcca

SEQ ID NO: 542 - RNA, 19 nt, synthetic construct
  source 1..19: mol_type = other RNA
gaggaggagcctgacctgc

SEQ ID NO: 543 - RNA, 19 nt, synthetic construct
  source 1..19: mol_type = other RNA
acacagagtttaagtccac

SEQ ID NO: 544 - RNA, 19 nt, synthetic construct
  source 1..19: mol_type = other RNA
aggaggagcctgacctgcc

SEQ ID NO: 545 - RNA, 19 nt, synthetic construct
  source 1..19: mol_type = other RNA
cacagagtttaagtccaca

SEQ ID NO: 546 - RNA, 19 nt, synthetic construct
  source 1..19: mol_type = other RNA
ggaggagcctgacctgcct

SEQ ID NO: 547 - RNA, 19 nt, synthetic construct
  source 1..19: mol_type = other RNA
acagagtttaagtccacat

SEQ ID NO: 548 - RNA, 19 nt, synthetic construct
  source 1..19: mol_type = other RNA
gaggagcctgacctgcctg

SEQ ID NO: 549 - RNA, 19 nt, synthetic construct
  source 1..19: mol_type = other RNA
cagagtttaagtccacatt

SEQ ID NO: 550 - RNA, 19 nt, synthetic construct
  source 1..19: mol_type = other RNA
aggagcctgacctgcctga

SEQ ID NO: 551 - RNA, 19 nt, synthetic construct
  source 1..19: mol_type = other RNA
agagtttaagtccacattg

SEQ ID NO: 552 - RNA, 19 nt, synthetic construct
  source 1..19: mol_type = other RNA
ggagcctgacctgcctgag

SEQ ID NO: 553 - RNA, 19 nt, synthetic construct
  source 1..19: mol_type = other RNA
gagtttaagtccacattga

SEQ ID NO: 554 - RNA, 19 nt, synthetic construct
  source 1..19: mol_type = other RNA
gagcctgacctgcctgagg

SEQ ID NO: 555 - RNA, 19 nt, synthetic construct
  source 1..19: mol_type = other RNA
agtttaagtccacattgaa

SEQ ID NO: 556 - RNA, 19 nt, synthetic construct
  source 1..19: mol_type = other RNA
agcctgacctgcctgaggt

SEQ ID NO: 557 - RNA, 19 nt, synthetic construct
  source 1..19: mol_type = other RNA
gtttaagtccacattgaag

SEQ ID NO: 558 - RNA, 19 nt, synthetic construct
  source 1..19: mol_type = other RNA
gcctgacctgcctgaggtt

SEQ ID NO: 559 - RNA, 19 nt, synthetic construct
  source 1..19: mol_type = other RNA
tttaagtccacattgaagg

SEQ ID NO: 560 - RNA, 19 nt, synthetic construct
  source 1..19: mol_type = other RNA
cctgacctgcctgaggttg

SEQ ID NO: 561 - RNA, 19 nt, synthetic construct
  source 1..19: mol_type = other RNA
ttaagtccacattgaaggt

SEQ ID NO: 562 - RNA, 19 nt, synthetic construct
  source 1..19: mol_type = other RNA
ctgacctgcctgaggttga

SEQ ID NO: 563 - RNA, 19 nt, synthetic construct
  source 1..19: mol_type = other RNA
taagtccacattgaaggta

SEQ ID NO: 564 - RNA, 19 nt, synthetic construct
  source 1..19: mol_type = other RNA
tgacctgcctgaggttgat

SEQ ID NO: 565 - RNA, 19 nt, synthetic construct
  source 1..19: mol_type = other RNA
aagtccacattgaaggtaa

SEQ ID NO: 566 - RNA, 19 nt, synthetic construct
  source 1..19: mol_type = other RNA
gacctgcctgaggttgatg

SEQ ID NO: 567 - RNA, 19 nt, synthetic construct
  source 1..19: mol_type = other RNA
agtccacattgaaggtaat

SEQ ID NO: 568 - RNA, 19 nt, synthetic construct
  source 1..19: mol_type = other RNA
acctgcctgaggttgatgt

SEQ ID NO: 569 - RNA, 19 nt, synthetic construct
  source 1..19: mol_type = other RNA
gtccacattgaaggtaatt

SEQ ID NO: 570 - RNA, 19 nt, synthetic construct
  source 1..19: mol_type = other RNA
cctgcctgaggttgatgtg

SEQ ID NO: 571 - RNA, 19 nt, synthetic construct
  source 1..19: mol_type = other RNA
tccacattgaaggtaattc

SEQ ID NO: 572 - RNA, 19 nt, synthetic construct
  source 1..19: mol_type = other RNA
ctgcctgaggttgatgtgg

SEQ ID NO: 573 - RNA, 19 nt, synthetic construct
  source 1..19: mol_type = other RNA
ccacattgaaggtaattct

SEQ ID NO: 574 - RNA, 19 nt, synthetic construct
  source 1..19: mol_type = other RNA
tgcctgaggttgatgtgga

SEQ ID NO: 575 - RNA, 19 nt, synthetic construct
  source 1..19: mol_type = other RNA
cacattgaaggtaattctg

SEQ ID NO: 576 - RNA, 19 nt, synthetic construct
  source 1..19: mol_type = other RNA
gcctgaggttgatgtggag

SEQ ID NO: 577 - RNA, 19 nt, synthetic construct
  source 1..19: mol_type = other RNA
acattgaaggtaattctgc

SEQ ID NO: 578 - RNA, 19 nt, synthetic construct
  source 1..19: mol_type = other RNA
cctgaggttgatgtggagc

SEQ ID NO: 579 - RNA, 19 nt, synthetic construct
  source 1..19: mol_type = other RNA
cattgaaggtaattctgcc

SEQ ID NO: 580 - RNA, 19 nt, synthetic construct
  source 1..19: mol_type = other RNA
ctgaggttgatgtggagct

SEQ ID NO: 581 - RNA, 19 nt, synthetic construct
  source 1..19: mol_type = other RNA
attgaaggtaattctgccc

SEQ ID NO: 582 - RNA, 19 nt, synthetic construct
  source 1..19: mol_type = other RNA
tgaggttgatgtggagctc

SEQ ID NO: 583 - RNA, 19 nt, synthetic construct
  source 1..19: mol_type = other RNA
ttgaaggtaattctgcccc

SEQ ID NO: 584 - RNA, 19 nt, synthetic construct
  source 1..19: mol_type = other RNA
gaggttgatgtggagctcc

SEQ ID NO: 585 - RNA, 19 nt, synthetic construct
  source 1..19: mol_type = other RNA
tgaaggtaattctgccccc

SEQ ID NO: 586 - RNA, 19 nt, synthetic construct
  source 1..19: mol_type = other RNA
aggttgatgtggagctccc

SEQ ID NO: 587 - RNA, 19 nt, synthetic construct
  source 1..19: mol_type = other RNA
gaaggtaattctgccccca

SEQ ID NO: 588 - RNA, 19 nt, synthetic construct
  source 1..19: mol_type = other RNA
ggttgatgtggagctcccc

SEQ ID NO: 589 - RNA, 19 nt, synthetic construct
  source 1..19: mol_type = other RNA
aaggtaattctgcccccag

SEQ ID NO: 590 - RNA, 19 nt, synthetic construct
  source 1..19: mol_type = other RNA
gttgatgtggagctcccca

SEQ ID NO: 591 - RNA, 19 nt, synthetic construct
  source 1..19: mol_type = other RNA
aggtaattctgcccccaga

SEQ ID NO: 592 - RNA, 19 nt, synthetic construct
  source 1..19: mol_type = other RNA
ttgatgtggagctccccac

SEQ ID NO: 593 - RNA, 19 nt, synthetic construct
  source 1..19: mol_type = other RNA
ggtaattctgcccccagac

SEQ ID NO: 594 - RNA, 19 nt, synthetic construct
  source 1..19: mol_type = other RNA
tgatgtggagctccccacg

SEQ ID NO: 595 - RNA, 19 nt, synthetic construct
  source 1..19: mol_type = other RNA
gtaattctgcccccagacc

SEQ ID NO: 596 - RNA, 19 nt, synthetic construct
  source 1..19: mol_type = other RNA
gatgtggagctccccacga

SEQ ID NO: 597 - RNA, 19 nt, synthetic construct
  source 1..19: mol_type = other RNA
taattctgcccccagaccc

SEQ ID NO: 598 - RNA, 19 nt, synthetic construct
  source 1..19: mol_type = other RNA
atgtggagctccccacgat

SEQ ID NO: 599 - RNA, 19 nt, synthetic construct
  source 1..19: mol_type = other RNA
aattctgcccccagacccc

SEQ ID NO: 600 - RNA, 19 nt, synthetic construct
  source 1..19: mol_type = other RNA
tgtggagctccccacgatg

SEQ ID NO: 601 - RNA, 19 nt, synthetic construct
  source 1..19: mol_type = other RNA
attctgcccccagacccct

SEQ ID NO: 602 - RNA, 19 nt, synthetic construct
  source 1..19: mol_type = other RNA
gtggagctccccacgatgc

SEQ ID NO: 603 - RNA, 19 nt, synthetic construct
  source 1..19: mol_type = other RNA
ttctgcccccagacccctc

SEQ ID NO: 604 - RNA, 19 nt, synthetic construct
  source 1..19: mol_type = other RNA
tggagctccccacgatgcc

SEQ ID NO: 605 - RNA, 19 nt, synthetic construct
  source 1..19: mol_type = other RNA
tctgcccccagacccctcc

SEQ ID NO: 606 - RNA, 19 nt, synthetic construct
  source 1..19: mol_type = other RNA
ggagctccccacgatgcca

SEQ ID NO: 607 - RNA, 19 nt, synthetic construct
  source 1..19: mol_type = other RNA
ctgcccccagacccctccg

SEQ ID NO: 608 - RNA, 19 nt, synthetic construct
  source 1..19: mol_type = other RNA
gagctccccacgatgccaa

SEQ ID NO: 609 - RNA, 19 nt, synthetic construct
  source 1..19: mol_type = other RNA
tgcccccagacccctccgt

SEQ ID NO: 610 - RNA, 19 nt, synthetic construct
  source 1..19: mol_type = other RNA
agctccccacgatgccaaa

SEQ ID NO: 611 - RNA, 19 nt, synthetic construct
  source 1..19: mol_type = other RNA
gcccccagacccctccgtg

SEQ ID NO: 612 - RNA, 19 nt, synthetic construct
  source 1..19: mol_type = other RNA
gctccccacgatgccaaag

SEQ ID NO: 613 - RNA, 19 nt, synthetic construct
  source 1..19: mol_type = other RNA
cccccagacccctccgtgg

SEQ ID NO: 614 - RNA, 19 nt, synthetic construct
  source 1..19: mol_type = other RNA
ctccccacgatgccaaagg

SEQ ID NO: 615 - RNA, 19 nt, synthetic construct
  source 1..19: mol_type = other RNA
ccccagacccctccgtgga

SEQ ID NO: 616 - RNA, 19 nt, synthetic construct
  source 1..19: mol_type = other RNA
tccccacgatgccaaagga

SEQ ID NO: 617 - RNA, 19 nt, synthetic construct
  source 1..19: mol_type = other RNA
cccagacccctccgtggag

SEQ ID NO: 618 - RNA, 19 nt, synthetic construct
  source 1..19: mol_type = other RNA
ccccacgatgccaaaggac

SEQ ID NO: 619 - RNA, 19 nt, synthetic construct
  source 1..19: mol_type = other RNA
ccagacccctccgtggagc

SEQ ID NO: 620 - RNA, 19 nt, synthetic construct
  source 1..19: mol_type = other RNA
cccacgatgccaaaggaca

SEQ ID NO: 621 - RNA, 19 nt, synthetic construct
  source 1..19: mol_type = other RNA
cagacccctccgtggagct

SEQ ID NO: 622 - RNA, 19 nt, synthetic construct
  source 1..19: mol_type = other RNA
ccacgatgccaaaggacag

SEQ ID NO: 623 - RNA, 19 nt, synthetic construct
  source 1..19: mol_type = other RNA
agacccctccgtggagctg

SEQ ID NO: 624 - RNA, 19 nt, synthetic construct
  source 1..19: mol_type = other RNA
cacgatgccaaaggacagc

SEQ ID NO: 625 - RNA, 19 nt, synthetic construct
  source 1..19: mol_type = other RNA
gacccctccgtggagctgt

SEQ ID NO: 626 - RNA, 19 nt, synthetic construct
  source 1..19: mol_type = other RNA
acgatgccaaaggacagcc

SEQ ID NO: 627 - RNA, 19 nt, synthetic construct
  source 1..19: mol_type = other RNA
acccctccgtggagctgta

SEQ ID NO: 628 - RNA, 19 nt, synthetic construct
  source 1..19: mol_type = other RNA
cgatgccaaaggacagccc

SEQ ID NO: 629 - RNA, 19 nt, synthetic construct
  source 1..19: mol_type = other RNA
cccctccgtggagctgtag

SEQ ID NO: 630 - RNA, 19 nt, synthetic construct
  source 1..19: mol_type = other RNA
gatgccaaaggacagccct

SEQ ID NO: 631 - RNA, 19 nt, synthetic construct
  source 1..19: mol_type = other RNA
ccctccgtggagctgtagt

SEQ ID NO: 632 - RNA, 19 nt, synthetic construct
  source 1..19: mol_type = other RNA
atgccaaaggacagccctc

SEQ ID NO: 633 - RNA, 19 nt, synthetic construct
  source 1..19: mol_type = other RNA
cctccgtggagctgtagtc

SEQ ID NO: 634 - RNA, 19 nt, synthetic construct
  source 1..19: mol_type = other RNA
tgccaaaggacagccctca

SEQ ID NO: 635 - RNA, 19 nt, synthetic construct
  source 1..19: mol_type = other RNA
ctccgtggagctgtagtcc

SEQ ID NO: 636 - RNA, 19 nt, synthetic construct
  source 1..19: mol_type = other RNA
gccaaaggacagccctcag

SEQ ID NO: 637 - RNA, 19 nt, synthetic construct
  source 1..19: mol_type = other RNA
tccgtggagctgtagtcct

SEQ ID NO: 638 - RNA, 19 nt, synthetic construct
  source 1..19: mol_type = other RNA
ccaaaggacagccctcagc

SEQ ID NO: 639 - RNA, 19 nt, synthetic construct
  source 1..19: mol_type = other RNA
ccgtggagctgtagtcctc

SEQ ID NO: 640 - RNA, 19 nt, synthetic construct
  source 1..19: mol_type = other RNA
caaaggacagccctcagca

SEQ ID NO: 641 - RNA, 19 nt, synthetic construct
  source 1..19: mol_type = other RNA
cgtggagctgtagtcctct

SEQ ID NO: 642 - RNA, 19 nt, synthetic construct
  source 1..19: mol_type = other RNA
aaaggacagccctcagcag

SEQ ID NO: 643 - RNA, 19 nt, synthetic construct
  source 1..19: mol_type = other RNA
gtggagctgtagtcctctt

SEQ ID NO: 644 - RNA, 19 nt, synthetic construct
  source 1..19: mol_type = other RNA
aaggacagccctcagcagt

SEQ ID NO: 645 - RNA, 19 nt, synthetic construct
  source 1..19: mol_type = other RNA
tggagctgtagtcctcttc

SEQ ID NO: 646 - RNA, 19 nt, synthetic construct
  source 1..19: mol_type = other RNA
aggacagccctcagcagtt

SEQ ID NO: 647 - RNA, 19 nt, synthetic construct
  source 1..19: mol_type = other RNA
ggagctgtagtcctcttcg

SEQ ID NO: 648 - RNA, 19 nt, synthetic construct
  source 1..19: mol_type = other RNA
ggacagccctcagcagttg

SEQ ID NO: 649 - RNA, 19 nt, synthetic construct
  source 1..19: mol_type = other RNA
gagctgtagtcctcttcgg

SEQ ID NO: 650 - RNA, 19 nt, synthetic construct
  source 1..19: mol_type = other RNA
gacagccctcagcagttgg

SEQ ID NO: 651 - RNA, 19 nt, synthetic construct
  source 1..19: mol_type = other RNA
agctgtagtcctcttcggg

SEQ ID NO: 652 - RNA, 19 nt, synthetic construct
  source 1..19: mol_type = other RNA
acagccctcagcagttgga

SEQ ID NO: 653 - RNA, 19 nt, synthetic construct
  source 1..19: mol_type = other RNA
gctgtagtcctcttcggga

SEQ ID NO: 654 - RNA, 19 nt, synthetic construct
  source 1..19: mol_type = other RNA
cagccctcagcagttggaa

SEQ ID NO: 655 - RNA, 19 nt, synthetic construct
  source 1..19: mol_type = other RNA
ctgtagtcctcttcgggaa

SEQ ID NO: 656 - RNA, 19 nt, synthetic construct
  source 1..19: mol_type = other RNA
agccctcagcagttggaac

SEQ ID NO: 657 - RNA, 19 nt, synthetic construct
  source 1..19: mol_type = other RNA
tgtagtcctcttcgggaaa

SEQ ID NO: 658 - RNA, 19 nt, synthetic construct
  source 1..19: mol_type = other RNA
gccctcagcagttggaact

SEQ ID NO: 659 - RNA, 19 nt, synthetic construct
  source 1..19: mol_type = other RNA
gtagtcctcttcgggaaaa

SEQ ID NO: 660 - RNA, 19 nt, synthetic construct
  source 1..19: mol_type = other RNA
ccctcagcagttggaactc

SEQ ID NO: 661 - RNA, 19 nt, synthetic construct
  source 1..19: mol_type = other RNA
tagtcctcttcgggaaaag

SEQ ID NO: 662 - RNA, 19 nt, synthetic construct
  source 1..19: mol_type = other RNA
cctcagcagttggaactct

SEQ ID NO: 663 - RNA, 19 nt, synthetic construct
  source 1..19: mol_type = other RNA
agtcctcttcgggaaaagg

SEQ ID NO: 664 - RNA, 19 nt, synthetic construct
  source 1..19: mol_type = other RNA
ctcagcagttggaactctt

SEQ ID NO: 665 - RNA, 19 nt, synthetic construct
  source 1..19: mol_type = other RNA
gtcctcttcgggaaaaggg

SEQ ID NO: 666 - RNA, 19 nt, synthetic construct
  source 1..19: mol_type = other RNA
tcagcagttggaactcttg

SEQ ID NO: 667 - RNA, 19 nt, synthetic construct
  source 1..19: mol_type = other RNA
tcctcttcgggaaaagggt

SEQ ID NO: 668 - RNA, 19 nt, synthetic construct
  source 1..19: mol_type = other RNA
cagcagttggaactcttga

SEQ ID NO: 669 - RNA, 19 nt, synthetic construct
  source 1..19: mol_type = other RNA
cctcttcgggaaaagggtc

SEQ ID NO: 670 - RNA, 19 nt, synthetic construct
  source 1..19: mol_type = other RNA
agcagttggaactcttgag

SEQ ID NO: 671 - RNA, 19 nt, synthetic construct
  source 1..19: mol_type = other RNA
ctcttcgggaaaagggtcc

SEQ ID NO: 672 - RNA, 19 nt, synthetic construct
  source 1..19: mol_type = other RNA
gcagttggaactcttgagt

SEQ ID NO: 673 - RNA, 19 nt, synthetic construct
  source 1..19: mol_type = other RNA
tcttcgggaaaagggtcct

SEQ ID NO: 674 - RNA, 19 nt, synthetic construct
  source 1..19: mol_type = other RNA
cagttggaactcttgagtg

SEQ ID NO: 675 - RNA, 19 nt, synthetic construct
  source 1..19: mol_type = other RNA
cttcgggaaaagggtcctg

SEQ ID NO: 676 - RNA, 19 nt, synthetic construct
  source 1..19: mol_type = other RNA
agttggaactcttgagtgg

SEQ ID NO: 677 - RNA, 19 nt, synthetic construct
  source 1..19: mol_type = other RNA
ttcgggaaaagggtcctgg

SEQ ID NO: 678 - RNA, 19 nt, synthetic construct
  source 1..19: mol_type = other RNA
gttggaactcttgagtggg

SEQ ID NO: 679 - RNA, 19 nt, synthetic construct
  source 1..19: mol_type = other RNA
tcgggaaaagggtcctgga

SEQ ID NO: 680 - RNA, 19 nt, synthetic construct
  source 1..19: mol_type = other RNA
ttggaactcttgagtgggc

SEQ ID NO: 681 - RNA, 19 nt, synthetic construct
  source 1..19: mol_type = other RNA
cgggaaaagggtcctggag

SEQ ID NO: 682 - RNA, 19 nt, synthetic construct
  source 1..19: mol_type = other RNA
tggaactcttgagtgggcc

SEQ ID NO: 683 - RNA, 19 nt, synthetic construct
  source 1..19: mol_type = other RNA
gggaaaagggtcctggagt

SEQ ID NO: 684 - RNA, 19 nt, synthetic construct
  source 1..19: mol_type = other RNA
ggaactcttgagtgggccc

SEQ ID NO: 685 - RNA, 19 nt, synthetic construct
  source 1..19: mol_type = other RNA
ggaaaagggtcctggagtg

SEQ ID NO: 686 - RNA, 19 nt, synthetic construct
  source 1..19: mol_type = other RNA
gaactcttgagtgggccct

SEQ ID NO: 687 - RNA, 19 nt, synthetic construct
  source 1..19: mol_type = other RNA
gaaaagggtcctggagtgg

SEQ ID NO: 688 - RNA, 19 nt, synthetic construct
  source 1..19: mol_type = other RNA
aactcttgagtgggccctg

SEQ ID NO: 689 - RNA, 19 nt, synthetic construct
  source 1..19: mol_type = other RNA
aaaagggtcctggagtgga

SEQ ID NO: 690 - RNA, 19 nt, synthetic construct
  source 1..19: mol_type = other RNA
actcttgagtgggccctgt

SEQ ID NO: 691 - RNA, 19 nt, synthetic construct
  source 1..19: mol_type = other RNA
aaagggtcctggagtggac

SEQ ID NO: 692 - RNA, 19 nt, synthetic construct
  source 1..19: mol_type = other RNA
ctcttgagtgggccctgtg

SEQ ID NO: 693 - RNA, 19 nt, synthetic construct
  source 1..19: mol_type = other RNA
aagggtcctggagtggact

SEQ ID NO: 694 - RNA, 19 nt, synthetic construct
  source 1..19: mol_type = other RNA
tcttgagtgggccctgtga

SEQ ID NO: 695 - RNA, 19 nt, synthetic construct
  source 1..19: mol_type = other RNA
agggtcctggagtggactc

SEQ ID NO: 696 - RNA, 19 nt, synthetic construct
  source 1..19: mol_type = other RNA
cttgagtgggccctgtgag

SEQ ID NO: 697 - RNA, 19 nt, synthetic construct
  source 1..19: mol_type = other RNA
gggtcctggagtggactct

SEQ ID NO: 698 - RNA, 19 nt, synthetic construct
  source 1..19: mol_type = other RNA
ttgagtgggccctgtgaga

SEQ ID NO: 699 - RNA, 19 nt, synthetic construct
  source 1..19: mol_type = other RNA
ggtcctggagtggactctt

SEQ ID NO: 700 - RNA, 19 nt, synthetic construct
  source 1..19: mol_type = other RNA
tgagtgggccctgtgagag

SEQ ID NO: 701 - RNA, 19 nt, synthetic construct
  source 1..19: mol_type = other RNA
gtcctggagtggactcttt

SEQ ID NO: 702 - RNA, 19 nt, synthetic construct
  source 1..19: mol_type = other RNA
gagtgggccctgtgagagg

SEQ ID NO: 703 - RNA, 19 nt, synthetic construct
  source 1..19: mol_type = other RNA
tcctggagtggactctttc

SEQ ID NO: 704 - RNA, 19 nt, synthetic construct
  source 1..19: mol_type = other RNA
agtgggccctgtgagagga

SEQ ID NO: 705 - RNA, 19 nt, synthetic construct
  source 1..19: mol_type = other RNA
cctggagtggactctttct

SEQ ID NO: 706 - RNA, 19 nt, synthetic construct
  source 1..19: mol_type = other RNA
gtgggccctgtgagaggag

SEQ ID NO: 707 - RNA, 19 nt, synthetic construct
  source 1..19: mol_type = other RNA
ctggagtggactctttctc

SEQ ID NO: 708 - RNA, 19 nt, synthetic construct
  source 1..19: mol_type = other RNA
tgggccctgtgagaggaga

SEQ ID NO: 709 - RNA, 19 nt, synthetic construct
  source 1..19: mol_type = other RNA
tggagtggactctttctcc

SEQ ID NO: 710 - RNA, 19 nt, synthetic construct
  source 1..19: mol_type = other RNA
gggccctgtgagaggagaa

SEQ ID NO: 711 - RNA, 19 nt, synthetic construct
  source 1..19: mol_type = other RNA
ggagtggactctttctcct

SEQ ID NO: 712 - RNA, 19 nt, synthetic construct
  source 1..19: mol_type = other RNA
ggccctgtgagaggagaaa

SEQ ID NO: 713 - RNA, 19 nt, synthetic construct
  source 1..19: mol_type = other RNA
gagtggactctttctcctc

SEQ ID NO: 714 - RNA, 19 nt, synthetic construct
  source 1..19: mol_type = other RNA
gccctgtgagaggagaaag

SEQ ID NO: 715 - RNA, 19 nt, synthetic construct
  source 1..19: mol_type = other RNA
agtggactctttctcctct

SEQ ID NO: 716 - RNA, 19 nt, synthetic construct
  source 1..19: mol_type = other RNA
ccctgtgagaggagaaaga

SEQ ID NO: 717 - RNA, 19 nt, synthetic construct
  source 1..19: mol_type = other RNA
gtggactctttctcctctc

SEQ ID NO: 718 - RNA, 19 nt, synthetic construct
  source 1..19: mol_type = other RNA
cctgtgagaggagaaagag

SEQ ID NO: 719 - RNA, 19 nt, synthetic construct
  source 1..19: mol_type = other RNA
tggactctttctcctctca

SEQ ID NO: 720 - RNA, 19 nt, synthetic construct
  source 1..19: mol_type = other RNA
ctgtgagaggagaaagagt

SEQ ID NO: 721 - RNA, 19 nt, synthetic construct
  source 1..19: mol_type = other RNA
ggactctttctcctctcac

SEQ ID NO: 722 - RNA, 19 nt, synthetic construct
  source 1..19: mol_type = other RNA
tgtgagaggagaaagagtc

SEQ ID NO: 723 - RNA, 19 nt, synthetic construct
  source 1..19: mol_type = other RNA
gactctttctcctctcaca

SEQ ID NO: 724 - RNA, 19 nt, synthetic construct
  source 1..19: mol_type = other RNA
gtgagaggagaaagagtcc

SEQ ID NO: 725 - RNA, 19 nt, synthetic construct
  source 1..19: mol_type = other RNA
actctttctcctctcacag

SEQ ID NO: 726 - RNA, 19 nt, synthetic construct
  source 1..19: mol_type = other RNA
tgagaggagaaagagtcca

SEQ ID NO: 727 - RNA, 19 nt, synthetic construct
  source 1..19: mol_type = other RNA
ctctttctcctctcacagg

SEQ ID NO: 728 - RNA, 19 nt, synthetic construct
  source 1..19: mol_type = other RNA
gagaggagaaagagtccac

SEQ ID NO: 729 - RNA, 19 nt, synthetic construct
  source 1..19: mol_type = other RNA
tctttctcctctcacaggg

SEQ ID NO: 730 - RNA, 19 nt, synthetic construct
  source 1..19: mol_type = other RNA
agaggagaaagagtccact

SEQ ID NO: 731 - RNA, 19 nt, synthetic construct
  source 1..19: mol_type = other RNA
ctttctcctctcacagggc

SEQ ID NO: 732 - RNA, 19 nt, synthetic construct
  source 1..19: mol_type = other RNA
gaggagaaagagtccactc

SEQ ID NO: 733 - RNA, 19 nt, synthetic construct
  source 1..19: mol_type = other RNA
tttctcctctcacagggcc

SEQ ID NO: 734 - RNA, 19 nt, synthetic construct
  source 1..19: mol_type = other RNA
aggagaaagagtccactcc

SEQ ID NO: 735 - RNA, 19 nt, synthetic construct
  source 1..19: mol_type = other RNA
ttctcctctcacagggccc

SEQ ID NO: 736 - RNA, 19 nt, synthetic construct
  source 1..19: mol_type = other RNA
ggagaaagagtccactcca

SEQ ID NO: 737 - RNA, 19 nt, synthetic construct
  source 1..19: mol_type = other RNA
tctcctctcacagggccca

SEQ ID NO: 738 - RNA, 19 nt, synthetic construct
  source 1..19: mol_type = other RNA
gagaaagagtccactccag

SEQ ID NO: 739 - RNA, 19 nt, synthetic construct
  source 1..19: mol_type = other RNA
ctcctctcacagggcccac

SEQ ID NO: 740 - RNA, 19 nt, synthetic construct
  source 1..19: mol_type = other RNA
agaaagagtccactccagg

SEQ ID NO: 741 - RNA, 19 nt, synthetic construct
  source 1..19: mol_type = other RNA
tcctctcacagggcccact

SEQ ID NO: 742 - RNA, 19 nt, synthetic construct
  source 1..19: mol_type = other RNA
gaaagagtccactccagga

SEQ ID NO: 743 - RNA, 19 nt, synthetic construct
  source 1..19: mol_type = other RNA
cctctcacagggcccactc

SEQ ID NO: 744 - RNA, 19 nt, synthetic construct
  source 1..19: mol_type = other RNA
aaagagtccactccaggac

SEQ ID NO: 745 - RNA, 19 nt, synthetic construct
  source 1..19: mol_type = other RNA
ctctcacagggcccactca

SEQ ID NO: 746 - RNA, 19 nt, synthetic construct
  source 1..19: mol_type = other RNA
aagagtccactccaggacc

SEQ ID NO: 747 - RNA, 19 nt, synthetic construct
  source 1..19: mol_type = other RNA
tctcacagggcccactcaa

SEQ ID NO: 748 - RNA, 19 nt, synthetic construct
  source 1..19: mol_type = other RNA
agagtccactccaggaccc

SEQ ID NO: 749 - RNA, 19 nt, synthetic construct
  source 1..19: mol_type = other RNA
ctcacagggcccactcaag

SEQ ID NO: 750 - RNA, 19 nt, synthetic construct
  source 1..19: mol_type = other RNA
gagtccactccaggaccct

SEQ ID NO: 751 - RNA, 19 nt, synthetic construct
  source 1..19: mol_type = other RNA
tcacagggcccactcaaga

SEQ ID NO: 752 - RNA, 19 nt, synthetic construct
  source 1..19: mol_type = other RNA
agtccactccaggaccctt

SEQ ID NO: 753 - RNA, 19 nt, synthetic construct
  source 1..19: mol_type = other RNA
cacagggcccactcaagag

SEQ ID NO: 754 - RNA, 19 nt, synthetic construct
  source 1..19: mol_type = other RNA
gtccactccaggacccttt

SEQ ID NO: 755 - RNA, 19 nt, synthetic construct
  source 1..19: mol_type = other RNA
acagggcccactcaagagt

SEQ ID NO: 756 - RNA, 19 nt, synthetic construct
  source 1..19: mol_type = other RNA
tccactccaggaccctttt

SEQ ID NO: 757 - RNA, 19 nt, synthetic construct
  source 1..19: mol_type = other RNA
cagggcccactcaagagtt

SEQ ID NO: 758 - RNA, 19 nt, synthetic construct
  source 1..19: mol_type = other RNA
ccactccaggacccttttc

SEQ ID NO: 759 - RNA, 19 nt, synthetic construct
  source 1..19: mol_type = other RNA
agggcccactcaagagttc

SEQ ID NO: 760 - RNA, 19 nt, synthetic construct
  source 1..19: mol_type = other RNA
cactccaggacccttttcc

SEQ ID NO: 761 - RNA, 19 nt, synthetic construct
  source 1..19: mol_type = other RNA
gggcccactcaagagttcc

SEQ ID NO: 762 - RNA, 19 nt, synthetic construct
  source 1..19: mol_type = other RNA
actccaggacccttttccc

SEQ ID NO: 763 - RNA, 19 nt, synthetic construct
  source 1..19: mol_type = other RNA
ggcccactcaagagttcca

SEQ ID NO: 764 - RNA, 19 nt, synthetic construct
  source 1..19: mol_type = other RNA
ctccaggacccttttcccg

SEQ ID NO: 765 - RNA, 19 nt, synthetic construct
  source 1..19: mol_type = other RNA
gcccactcaagagttccaa

SEQ ID NO: 766 - RNA, 19 nt, synthetic construct
  source 1..19: mol_type = other RNA
tccaggacccttttcccga

SEQ ID NO: 767 - RNA, 19 nt, synthetic construct
  source 1..19: mol_type = other RNA
cccactcaagagttccaac

SEQ ID NO: 768 - RNA, 19 nt, synthetic construct
  source 1..19: mol_type = other RNA
ccaggacccttttcccgaa

SEQ ID NO: 769 - RNA, 19 nt, synthetic construct
  source 1..19: mol_type = other RNA
ccactcaagagttccaact

SEQ ID NO: 770 - RNA, 19 nt, synthetic construct
  source 1..19: mol_type = other RNA
caggacccttttcccgaag

SEQ ID NO: 771 - RNA, 19 nt, synthetic construct
  source 1..19: mol_type = other RNA
cactcaagagttccaactg

SEQ ID NO: 772 - RNA, 19 nt, synthetic construct
  source 1..19: mol_type = other RNA
aggacccttttcccgaaga

SEQ ID NO: 773 - RNA, 19 nt, synthetic construct
  source 1..19: mol_type = other RNA
actcaagagttccaactgc

SEQ ID NO: 774 - RNA, 19 nt, synthetic construct
  source 1..19: mol_type = other RNA
ggacccttttcccgaagag

SEQ ID NO: 775 - RNA, 19 nt, synthetic construct
  source 1..19: mol_type = other RNA
ctcaagagttccaactgct

SEQ ID NO: 776 - RNA, 19 nt, synthetic construct
  source 1..19: mol_type = other RNA
gacccttttcccgaagagg

SEQ ID NO: 777 - RNA, 19 nt, synthetic construct
  source 1..19: mol_type = other RNA
tcaagagttccaactgctg

SEQ ID NO: 778 - RNA, 19 nt, synthetic construct
  source 1..19: mol_type = other RNA
acccttttcccgaagagga

SEQ ID NO: 779 - RNA, 19 nt, synthetic construct
  source 1..19: mol_type = other RNA
caagagttccaactgctga

SEQ ID NO: 780 - RNA, 19 nt, synthetic construct
  source 1..19: mol_type = other RNA
cccttttcccgaagaggac

SEQ ID NO: 781 - RNA, 19 nt, synthetic construct
  source 1..19: mol_type = other RNA
aagagttccaactgctgag

SEQ ID NO: 782 - RNA, 19 nt, synthetic construct
  source 1..19: mol_type = other RNA
ccttttcccgaagaggact

SEQ ID NO: 783 - RNA, 19 nt, synthetic construct
  source 1..19: mol_type = other RNA
agagttccaactgctgagg

SEQ ID NO: 784 - RNA, 19 nt, synthetic construct
  source 1..19: mol_type = other RNA
cttttcccgaagaggacta

SEQ ID NO: 785 - RNA, 19 nt, synthetic construct
  source 1..19: mol_type = other RNA
gagttccaactgctgaggg

SEQ ID NO: 786 - RNA, 19 nt, synthetic construct
  source 1..19: mol_type = other RNA
ttttcccgaagaggactac

SEQ ID NO: 787 - RNA, 19 nt, synthetic construct
  source 1..19: mol_type = other RNA
agttccaactgctgagggc

SEQ ID NO: 788 - RNA, 19 nt, synthetic construct
  source 1..19: mol_type = other RNA
tttcccgaagaggactaca

SEQ ID NO: 789 - RNA, 19 nt, synthetic construct
  source 1..19: mol_type = other RNA
gttccaactgctgagggct

SEQ ID NO: 790 - RNA, 19 nt, synthetic construct
  source 1..19: mol_type = other RNA
ttcccgaagaggactacag

SEQ ID NO: 791 - RNA, 19 nt, synthetic construct
  source 1..19: mol_type = other RNA
ttccaactgctgagggctg

SEQ ID NO: 792 - RNA, 19 nt, synthetic construct
  source 1..19: mol_type = other RNA
tcccgaagaggactacagc

SEQ ID NO: 793 - RNA, 19 nt, synthetic construct
  source 1..19: mol_type = other RNA
tccaactgctgagggctgt

SEQ ID NO: 794 - RNA, 19 nt, synthetic construct
  source 1..19: mol_type = other RNA
cccgaagaggactacagct

SEQ ID NO: 795 - RNA, 19 nt, synthetic construct
  source 1..19: mol_type = other RNA
ccaactgctgagggctgtc

SEQ ID NO: 796 - RNA, 19 nt, synthetic construct
  source 1..19: mol_type = other RNA
ccgaagaggactacagctc

SEQ ID NO: 797 - RNA, 19 nt, synthetic construct
  source 1..19: mol_type = other RNA
caactgctgagggctgtcc

SEQ ID NO: 798 - RNA, 19 nt, synthetic construct
  source 1..19: mol_type = other RNA
cgaagaggactacagctcc

SEQ ID NO: 799 - RNA, 19 nt, synthetic construct
  source 1..19: mol_type = other RNA
aactgctgagggctgtcct

SEQ ID NO: 800 - RNA, 19 nt, synthetic construct
  source 1..19: mol_type = other RNA
gaagaggactacagctcca

SEQ ID NO: 801 - RNA, 19 nt, synthetic construct
  source 1..19: mol_type = other RNA
actgctgagggctgtcctt

SEQ ID NO: 802 - RNA, 19 nt, synthetic construct
  source 1..19: mol_type = other RNA
aagaggactacagctccac

SEQ ID NO: 803 - RNA, 19 nt, synthetic construct
  source 1..19: mol_type = other RNA
ctgctgagggctgtccttt

SEQ ID NO: 804 - RNA, 19 nt, synthetic construct
  source 1..19: mol_type = other RNA
agaggactacagctccacg

SEQ ID NO: 805 - RNA, 19 nt, synthetic construct
  source 1..19: mol_type = other RNA
tgctgagggctgtcctttg

SEQ ID NO: 806 - RNA, 19 nt, synthetic construct
  source 1..19: mol_type = other RNA
gaggactacagctccacgg

SEQ ID NO: 807 - RNA, 19 nt, synthetic construct
  source 1..19: mol_type = other RNA
gctgagggctgtcctttgg

SEQ ID NO: 808 - RNA, 19 nt, synthetic construct
  source 1..19: mol_type = other RNA
aggactacagctccacgga

SEQ ID NO: 809 - RNA, 19 nt, synthetic construct
  source 1..19: mol_type = other RNA
ctgagggctgtcctttggc

SEQ ID NO: 810 - RNA, 19 nt, synthetic construct
  source 1..19: mol_type = other RNA
ggactacagctccacggag

SEQ ID NO: 811 - RNA, 19 nt, synthetic construct
  source 1..19: mol_type = other RNA
tgagggctgtcctttggca

SEQ ID NO: 812 - RNA, 19 nt, synthetic construct
  source 1..19: mol_type = other RNA
gactacagctccacggagg

SEQ ID NO: 813 - RNA, 19 nt, synthetic construct
  source 1..19: mol_type = other RNA
gagggctgtcctttggcat

SEQ ID NO: 814 - RNA, 19 nt, synthetic construct
  source 1..19: mol_type = other RNA
actacagctccacggaggg

SEQ ID NO: 815 - RNA, 19 nt, synthetic construct
  source 1..19: mol_type = other RNA
agggctgtcctttggcatc

SEQ ID NO: 816 - RNA, 19 nt, synthetic construct
  source 1..19: mol_type = other RNA
ctacagctccacggagggg

SEQ ID NO: 817 - RNA, 19 nt, synthetic construct
  source 1..19: mol_type = other RNA
gggctgtcctttggcatcg

SEQ ID NO: 818 - RNA, 19 nt, synthetic construct
  source 1..19: mol_type = other RNA
tacagctccacggaggggt

SEQ ID NO: 819 - RNA, 19 nt, synthetic construct
  source 1..19: mol_type = other RNA
ggctgtcctttggcatcgt

SEQ ID NO: 820 - RNA, 19 nt, synthetic construct
  source 1..19: mol_type = other RNA
acagctccacggaggggtc

SEQ ID NO: 821 - RNA, 19 nt, synthetic construct
  source 1..19: mol_type = other RNA
gctgtcctttggcatcgtg

SEQ ID NO: 822 - RNA, 19 nt, synthetic construct
  source 1..19: mol_type = other RNA
cagctccacggaggggtct

SEQ ID NO: 823 - RNA, 19 nt, synthetic construct
  source 1..19: mol_type = other RNA
ctgtcctttggcatcgtgg

SEQ ID NO: 824 - RNA, 19 nt, synthetic construct
  source 1..19: mol_type = other RNA
agctccacggaggggtctg

SEQ ID NO: 825 - RNA, 19 nt, synthetic construct
  source 1..19: mol_type = other RNA
tgtcctttggcatcgtggg

SEQ ID NO: 826 - RNA, 19 nt, synthetic construct
  source 1..19: mol_type = other RNA
gctccacggaggggtctgg

SEQ ID NO: 827 - RNA, 19 nt, synthetic construct
  source 1..19: mol_type = other RNA
gtcctttggcatcgtgggg

SEQ ID NO: 828 - RNA, 19 nt, synthetic construct
  source 1..19: mol_type = other RNA
ctccacggaggggtctggg

SEQ ID NO: 829 - RNA, 19 nt, synthetic construct
  source 1..19: mol_type = other RNA
tcctttggcatcgtgggga

SEQ ID NO: 830 - RNA, 19 nt, synthetic construct
  source 1..19: mol_type = other RNA
tccacggaggggtctgggg

SEQ ID NO: 831 - RNA, 19 nt, synthetic construct
  source 1..19: mol_type = other RNA
cctttggcatcgtggggag

SEQ ID NO: 832 - RNA, 19 nt, synthetic construct
  source 1..19: mol_type = other RNA
ccacggaggggtctggggg

SEQ ID NO: 833 - RNA, 19 nt, synthetic construct
  source 1..19: mol_type = other RNA
ctttggcatcgtggggagc

SEQ ID NO: 834 - RNA, 19 nt, synthetic construct
  source 1..19: mol_type = other RNA
cacggaggggtctgggggc

SEQ ID NO: 835 - RNA, 19 nt, synthetic construct
  source 1..19: mol_type = other RNA
tttggcatcgtggggagct

SEQ ID NO: 836 - RNA, 19 nt, synthetic construct
  source 1..19: mol_type = other RNA
acggaggggtctgggggca

SEQ ID NO: 837 - RNA, 19 nt, synthetic construct
  source 1..19: mol_type = other RNA
ttggcatcgtggggagctc

SEQ ID NO: 838 - RNA, 19 nt, synthetic construct
  source 1..19: mol_type = other RNA
cggaggggtctgggggcag

SEQ ID NO: 839 - RNA, 19 nt, synthetic construct
  source 1..19: mol_type = other RNA
tggcatcgtggggagctcc

SEQ ID NO: 840 - RNA, 19 nt, synthetic construct
  source 1..19: mol_type = other RNA
ggaggggtctgggggcaga

SEQ ID NO: 841 - RNA, 19 nt, synthetic construct
  source 1..19: mol_type = other RNA
ggcatcgtggggagctcca

SEQ ID NO: 842 - RNA, 19 nt, synthetic construct
  source 1..19: mol_type = other RNA
gaggggtctgggggcagaa

SEQ ID NO: 843 - RNA, 19 nt, synthetic construct
  source 1..19: mol_type = other RNA
gcatcgtggggagctccac

SEQ ID NO: 844 - RNA, 19 nt, synthetic construct
  source 1..19: mol_type = other RNA
aggggtctgggggcagaat

SEQ ID NO: 845 - RNA, 19 nt, synthetic construct
  source 1..19: mol_type = other RNA
catcgtggggagctccaca

SEQ ID NO: 846 - RNA, 19 nt, synthetic construct
  source 1..19: mol_type = other RNA
ggggtctgggggcagaatt

SEQ ID NO: 847 - RNA, 19 nt, synthetic construct
  source 1..19: mol_type = other RNA
atcgtggggagctccacat

SEQ ID NO: 848 - RNA, 19 nt, synthetic construct
  source 1..19: mol_type = other RNA
gggtctgggggcagaatta

SEQ ID NO: 849 - RNA, 19 nt, synthetic construct
  source 1..19: mol_type = other RNA
tcgtggggagctccacatc

SEQ ID NO: 850 - RNA, 19 nt, synthetic construct
  source 1..19: mol_type = other RNA
ggtctgggggcagaattac

SEQ ID NO: 851 - RNA, 19 nt, synthetic construct
  source 1..19: mol_type = other RNA
cgtggggagctccacatca

SEQ ID NO: 852 - RNA, 19 nt, synthetic construct
  source 1..19: mol_type = other RNA
gtctgggggcagaattacc

SEQ ID NO: 853 - RNA, 19 nt, synthetic construct
  source 1..19: mol_type = other RNA
gtggggagctccacatcaa

SEQ ID NO: 854 - RNA, 19 nt, synthetic construct
  source 1..19: mol_type = other RNA
tctgggggcagaattacct

SEQ ID NO: 855 - RNA, 19 nt, synthetic construct
  source 1..19: mol_type = other RNA
tggggagctccacatcaac

SEQ ID NO: 856 - RNA, 19 nt, synthetic construct
  source 1..19: mol_type = other RNA
ctgggggcagaattacctt

SEQ ID NO: 857 - RNA, 19 nt, synthetic construct
  source 1..19: mol_type = other RNA
ggggagctccacatcaacc

SEQ ID NO: 858 - RNA, 19 nt, synthetic construct
  source 1..19: mol_type = other RNA
tgggggcagaattaccttc

SEQ ID NO: 859 - RNA, 19 nt, synthetic construct
  source 1..19: mol_type = other RNA
gggagctccacatcaacct

SEQ ID NO: 860 - RNA, 19 nt, synthetic construct
  source 1..19: mol_type = other RNA
gggggcagaattaccttca

SEQ ID NO: 861 - RNA, 19 nt, synthetic construct
  source 1..19: mol_type = other RNA
ggagctccacatcaacctc

SEQ ID NO: 862 - RNA, 19 nt, synthetic construct
  source 1..19: mol_type = other RNA
ggggcagaattaccttcaa

SEQ ID NO: 863 - RNA, 19 nt, synthetic construct
  source 1..19: mol_type = other RNA
gagctccacatcaacctca

SEQ ID NO: 864 - RNA, 19 nt, synthetic construct
  source 1..19: mol_type = other RNA
gggcagaattaccttcaat

SEQ ID NO: 865 - RNA, 19 nt, synthetic construct
  source 1..19: mol_type = other RNA
agctccacatcaacctcag

SEQ ID NO: 866 - RNA, 19 nt, synthetic construct
  source 1..19: mol_type = other RNA
ggcagaattaccttcaatg

SEQ ID NO: 867 - RNA, 19 nt, synthetic construct
  source 1..19: mol_type = other RNA
gctccacatcaacctcagg

SEQ ID NO: 868 - RNA, 19 nt, synthetic construct
  source 1..19: mol_type = other RNA
gcagaattaccttcaatgt

SEQ ID NO: 869 - RNA, 19 nt, synthetic construct
  source 1..19: mol_type = other RNA
ctccacatcaacctcaggc

SEQ ID NO: 870 - RNA, 19 nt, synthetic construct
  source 1..19: mol_type = other RNA
cagaattaccttcaatgtg

SEQ ID NO: 871 - RNA, 19 nt, synthetic construct
  source 1..19: mol_type = other RNA
tccacatcaacctcaggca

SEQ ID NO: 872 - RNA, 19 nt, synthetic construct
  source 1..19: mol_type = other RNA
agaattaccttcaatgtgg

SEQ ID NO: 873 - RNA, 19 nt, synthetic construct
  source 1..19: mol_type = other RNA
ccacatcaacctcaggcag

SEQ ID NO: 874 - RNA, 19 nt, synthetic construct
  source 1..19: mol_type = other RNA
gaattaccttcaatgtgga

SEQ ID NO: 875 - RNA, 19 nt, synthetic construct
  source 1..19: mol_type = other RNA
cacatcaacctcaggcagg

SEQ ID NO: 876 - RNA, 19 nt, synthetic construct
  source 1..19: mol_type = other RNA
aattaccttcaatgtggac

SEQ ID NO: 877 - RNA, 19 nt, synthetic construct
  source 1..19: mol_type = other RNA
acatcaacctcaggcaggt

SEQ ID NO: 878 - RNA, 19 nt, synthetic construct
  source 1..19: mol_type = other RNA
attaccttcaatgtggact

SEQ ID NO: 879 - RNA, 19 nt, synthetic construct
  source 1..19: mol_type = other RNA
catcaacctcaggcaggtc

SEQ ID NO: 880 - RNA, 19 nt, synthetic construct
  source 1..19: mol_type = other RNA
ttaccttcaatgtggactt

SEQ ID NO: 881 - RNA, 19 nt, synthetic construct
  source 1..19: mol_type = other RNA
atcaacctcaggcaggtca

SEQ ID NO: 882 - RNA, 19 nt, synthetic construct
  source 1..19: mol_type = other RNA
taccttcaatgtggactta

SEQ ID NO: 883 - RNA, 19 nt, synthetic construct
  source 1..19: mol_type = other RNA
tcaacctcaggcaggtcag

SEQ ID NO: 884 - RNA, 19 nt, synthetic construct
  source 1..19: mol_type = other RNA
accttcaatgtggacttaa

SEQ ID NO: 885 - RNA, 19 nt, synthetic construct
  source 1..19: mol_type = other RNA
caacctcaggcaggtcagg

SEQ ID NO: 886 - RNA, 19 nt, synthetic construct
  source 1..19: mol_type = other RNA
ccttcaatgtggacttaaa

SEQ ID NO: 887 - RNA, 19 nt, synthetic construct
  source 1..19: mol_type = other RNA
aacctcaggcaggtcaggc

SEQ ID NO: 888 - RNA, 19 nt, synthetic construct
  source 1..19: mol_type = other RNA
cttcaatgtggacttaaac

SEQ ID NO: 889 - RNA, 19 nt, synthetic construct
  source 1..19: mol_type = other RNA
acctcaggcaggtcaggct

SEQ ID NO: 890 - RNA, 19 nt, synthetic construct
  source 1..19: mol_type = other RNA
ttcaatgtggacttaaact

SEQ ID NO: 891 - RNA, 19 nt, synthetic construct
  source 1..19: mol_type = other RNA
cctcaggcaggtcaggctc

SEQ ID NO: 892 - RNA, 19 nt, synthetic construct
  source 1..19: mol_type = other RNA
tcaatgtggacttaaactc

SEQ ID NO: 893 - RNA, 19 nt, synthetic construct
  source 1..19: mol_type = other RNA
ctcaggcaggtcaggctcc

SEQ ID NO: 894 - RNA, 19 nt, synthetic construct
  source 1..19: mol_type = other RNA
caatgtggacttaaactct

SEQ ID NO: 895 - RNA, 19 nt, synthetic construct
  source 1..19: mol_type = other RNA
tcaggcaggtcaggctcct

SEQ ID NO: 896 - RNA, 19 nt, synthetic construct
  source 1..19: mol_type = other RNA
aatgtggacttaaactctg

SEQ ID NO: 897 - RNA, 19 nt, synthetic construct
  source 1..19: mol_type = other RNA
caggcaggtcaggctcctc

SEQ ID NO: 898 - RNA, 19 nt, synthetic construct
  source 1..19: mol_type = other RNA
atgtggacttaaactctgt

SEQ ID NO: 899 - RNA, 19 nt, synthetic construct
  source 1..19: mol_type = other RNA
aggcaggtcaggctcctcc

SEQ ID NO: 900 - RNA, 19 nt, synthetic construct
  source 1..19: mol_type = other RNA
tgtggacttaaactctgtg

SEQ ID NO: 901 - RNA, 19 nt, synthetic construct
  source 1..19: mol_type = other RNA
ggcaggtcaggctcctcct

SEQ ID NO: 902 - RNA, 19 nt, synthetic construct
  source 1..19: mol_type = other RNA
gtggacttaaactctgtgt

SEQ ID NO: 903 - RNA, 19 nt, synthetic construct
  source 1..19: mol_type = other RNA
gcaggtcaggctcctcctc

SEQ ID NO: 904 - RNA, 19 nt, synthetic construct
  source 1..19: mol_type = other RNA
tggacttaaactctgtgtt

SEQ ID NO: 905 - RNA, 19 nt, synthetic construct
  source 1..19: mol_type = other RNA
caggtcaggctcctcctcg

SEQ ID NO: 906 - RNA, 19 nt, synthetic construct
  source 1..19: mol_type = other RNA
ggacttaaactctgtgttt

SEQ ID NO: 907 - RNA, 19 nt, synthetic construct
  source 1..19: mol_type = other RNA
aggtcaggctcctcctcgg

SEQ ID NO: 908 - RNA, 19 nt, synthetic construct
  source 1..19: mol_type = other RNA
gacttaaactctgtgtttt

SEQ ID NO: 909 - RNA, 19 nt, synthetic construct
  source 1..19: mol_type = other RNA
ggtcaggctcctcctcgga

SEQ ID NO: 910 - RNA, 19 nt, synthetic construct
  source 1..19: mol_type = other RNA
acttaaactctgtgttttt

SEQ ID NO: 911 - RNA, 19 nt, synthetic construct
  source 1..19: mol_type = other RNA
gtcaggctcctcctcggac

SEQ ID NO: 912 - RNA, 19 nt, synthetic construct
  source 1..19: mol_type = other RNA
cttaaactctgtgtttttg

SEQ ID NO: 913 - RNA, 19 nt, synthetic construct
  source 1..19: mol_type = other RNA
tcaggctcctcctcggact

SEQ ID NO: 914 - RNA, 19 nt, synthetic construct
  source 1..19: mol_type = other RNA
ttaaactctgtgtttttga

SEQ ID NO: 915 - RNA, 19 nt, synthetic construct
  source 1..19: mol_type = other RNA
caggctcctcctcggactc

SEQ ID NO: 916 - RNA, 19 nt, synthetic construct
  source 1..19: mol_type = other RNA
taaactctgtgtttttgag

SEQ ID NO: 917 - RNA, 19 nt, synthetic construct
  source 1..19: mol_type = other RNA
aggctcctcctcggactcc

SEQ ID NO: 918 - RNA, 19 nt, synthetic construct
  source 1..19: mol_type = other RNA
aaactctgtgtttttgaga

SEQ ID NO: 919 - RNA, 19 nt, synthetic construct
  source 1..19: mol_type = other RNA
ggctcctcctcggactccg

SEQ ID NO: 920 - RNA, 19 nt, synthetic construct
  source 1..19: mol_type = other RNA
aactctgtgtttttgagag

SEQ ID NO: 921 - RNA, 19 nt, synthetic construct
  source 1..19: mol_type = other RNA
gctcctcctcggactccgg

SEQ ID NO: 922 - RNA, 19 nt, synthetic construct
  source 1..19: mol_type = other RNA
actctgtgtttttgagagt

SEQ ID NO: 923 - RNA, 19 nt, synthetic construct
  source 1..19: mol_type = other RNA
ctcctcctcggactccggg

SEQ ID NO: 924 - RNA, 19 nt, synthetic construct
  source 1..19: mol_type = other RNA
ctctgtgtttttgagagtt

SEQ ID NO: 925 - RNA, 19 nt, synthetic construct
  source 1..19: mol_type = other RNA
tcctcctcggactccgggt

SEQ ID NO: 926 - RNA, 19 nt, synthetic construct
  source 1..19: mol_type = other RNA
tctgtgtttttgagagttc

SEQ ID NO: 927 - RNA, 19 nt, synthetic construct
  source 1..19: mol_type = other RNA
cctcctcggactccgggtc

SEQ ID NO: 928 - RNA, 19 nt, synthetic construct
  source 1..19: mol_type = other RNA
ctgtgtttttgagagttct

SEQ ID NO: 929 - RNA, 19 nt, synthetic construct
  source 1..19: mol_type = other RNA
ctcctcggactccgggtct

SEQ ID NO: 930 - RNA, 19 nt, synthetic construct
  source 1..19: mol_type = other RNA
tgtgtttttgagagttctt

SEQ ID NO: 931 - RNA, 19 nt, synthetic construct
  source 1..19: mol_type = other RNA
tcctcggactccgggtcta

SEQ ID NO: 932 - RNA, 19 nt, synthetic construct
  source 1..19: mol_type = other RNA
gtgtttttgagagttcttg

SEQ ID NO: 933 - RNA, 19 nt, synthetic construct
  source 1..19: mol_type = other RNA
cctcggactccgggtctat

SEQ ID NO: 934 - RNA, 19 nt, synthetic construct
  source 1..19: mol_type = other RNA
tgtttttgagagttcttga

SEQ ID NO: 935 - RNA, 19 nt, synthetic construct
  source 1..19: mol_type = other RNA
ctcggactccgggtctatc

SEQ ID NO: 936 - RNA, 19 nt, synthetic construct
  source 1..19: mol_type = other RNA
gtttttgagagttcttgat

SEQ ID NO: 937 - RNA, 19 nt, synthetic construct
  source 1..19: mol_type = other RNA
tcggactccgggtctatca

SEQ ID NO: 938 - RNA, 19 nt, synthetic construct
  source 1..19: mol_type = other RNA
tttttgagagttcttgatg

SEQ ID NO: 939 - RNA, 19 nt, synthetic construct
  source 1..19: mol_type = other RNA
cggactccgggtctatcaa

SEQ ID NO: 940 - RNA, 19 nt, synthetic construct
  source 1..19: mol_type = other RNA
ttttgagagttcttgatga

SEQ ID NO: 941 - RNA, 19 nt, synthetic construct
  source 1..19: mol_type = other RNA
ggactccgggtctatcaac

SEQ ID NO: 942 - RNA, 19 nt, synthetic construct
  source 1..19: mol_type = other RNA
tttgagagttcttgatgac

SEQ ID NO: 943 - RNA, 19 nt, synthetic construct
  source 1..19: mol_type = other RNA
gactccgggtctatcaact

SEQ ID NO: 944 - RNA, 19 nt, synthetic construct
  source 1..19: mol_type = other RNA
ttgagagttcttgatgacg

SEQ ID NO: 945 - RNA, 19 nt, synthetic construct
  source 1..19: mol_type = other RNA
actccgggtctatcaactg

SEQ ID NO: 946 - RNA, 19 nt, synthetic construct
  source 1..19: mol_type = other RNA
tgagagttcttgatgacga

SEQ ID NO: 947 - RNA, 19 nt, synthetic construct
  source 1..19: mol_type = other RNA
ctccgggtctatcaactgg

SEQ ID NO: 948 - RNA, 19 nt, synthetic construct
  source 1..19: mol_type = other RNA
gagagttcttgatgacgag

SEQ ID NO: 949 - RNA, 19 nt, synthetic construct
  source 1..19: mol_type = other RNA
tccgggtctatcaactggg

SEQ ID NO: 950 - RNA, 19 nt, synthetic construct
  source 1..19: mol_type = other RNA
agagttcttgatgacgagg

SEQ ID NO: 951 - RNA, 19 nt, synthetic construct
  source 1..19: mol_type = other RNA
ccgggtctatcaactggga

SEQ ID NO: 952 - RNA, 19 nt, synthetic construct
  source 1..19: mol_type = other RNA
gagttcttgatgacgagga

SEQ ID NO: 953 - RNA, 19 nt, synthetic construct
  source 1..19: mol_type = other RNA
cgggtctatcaactgggat

SEQ ID NO: 954 - RNA, 19 nt, synthetic construct
  source 1..19: mol_type = other RNA
agttcttgatgacgaggac

SEQ ID NO: 955 - RNA, 19 nt, synthetic construct
  source 1..19: mol_type = other RNA
gggtctatcaactgggatt

SEQ ID NO: 956 - RNA, 19 nt, synthetic construct
  source 1..19: mol_type = other RNA
gttcttgatgacgaggaca

SEQ ID NO: 957 - RNA, 19 nt, synthetic construct
  source 1..19: mol_type = other RNA
ggtctatcaactgggattc

SEQ ID NO: 958 - RNA, 19 nt, synthetic construct
  source 1..19: mol_type = other RNA
ttcttgatgacgaggacag

SEQ ID NO: 959 - RNA, 19 nt, synthetic construct
  source 1..19: mol_type = other RNA
gtctatcaactgggattct

SEQ ID NO: 960 - RNA, 19 nt, synthetic construct
  source 1..19: mol_type = other RNA
tcttgatgacgaggacagt

SEQ ID NO: 961 - RNA, 19 nt, synthetic construct
  source 1..19: mol_type = other RNA
tctatcaactgggattctg

SEQ ID NO: 962 - RNA, 19 nt, synthetic construct
  source 1..19: mol_type = other RNA
cttgatgacgaggacagtg

SEQ ID NO: 963 - RNA, 19 nt, synthetic construct
  source 1..19: mol_type = other RNA
ctatcaactgggattctgt

SEQ ID NO: 964 - RNA, 19 nt, synthetic construct
  source 1..19: mol_type = other RNA
ttgatgacgaggacagtga

SEQ ID NO: 965 - RNA, 19 nt, synthetic construct
  source 1..19: mol_type = other RNA
tatcaactgggattctgta

SEQ ID NO: 966 - RNA, 19 nt, synthetic construct
  source 1..19: mol_type = other RNA
tgatgacgaggacagtgac

SEQ ID NO: 967 - RNA, 19 nt, synthetic construct
  source 1..19: mol_type = other RNA
atcaactgggattctgtag

SEQ ID NO: 968 - RNA, 19 nt, synthetic construct
  source 1..19: mol_type = other RNA
gatgacgaggacagtgacg

SEQ ID NO: 969 - RNA, 19 nt, synthetic construct
  source 1..19: mol_type = other RNA
tcaactgggattctgtaga

SEQ ID NO: 970 - RNA, 19 nt, synthetic construct
  source 1..19: mol_type = other RNA
atgacgaggacagtgacga

SEQ ID NO: 971 - RNA, 19 nt, synthetic construct
  source 1..19: mol_type = other RNA
caactgggattctgtagag

SEQ ID NO: 972 - RNA, 19 nt, synthetic construct
  source 1..19: mol_type = other RNA
tgacgaggacagtgacgac

SEQ ID NO: 973 - RNA, 19 nt, synthetic construct
  source 1..19: mol_type = other RNA
aactgggattctgtagagg

SEQ ID NO: 974 - RNA, 19 nt, synthetic construct
  source 1..19: mol_type = other RNA
gacgaggacagtgacgact

SEQ ID NO: 975 - RNA, 19 nt, synthetic construct
  source 1..19: mol_type = other RNA
actgggattctgtagaggt

SEQ ID NO: 976 - RNA, 19 nt, synthetic construct
  source 1..19: mol_type = other RNA
acgaggacagtgacgactt

SEQ ID NO: 977 - RNA, 19 nt, synthetic construct
  source 1..19: mol_type = other RNA
ctgggattctgtagaggtg

SEQ ID NO: 978 - RNA, 19 nt, synthetic construct
  source 1..19: mol_type = other RNA
cgaggacagtgacgactta

SEQ ID NO: 979 - RNA, 19 nt, synthetic construct
  source 1..19: mol_type = other RNA
tgggattctgtagaggtgg

SEQ ID NO: 980 - RNA, 19 nt, synthetic construct
  source 1..19: mol_type = other RNA
gaggacagtgacgacttag

SEQ ID NO: 981 - RNA, 19 nt, synthetic construct
  source 1..19: mol_type = other RNA
gggattctgtagaggtggc

SEQ ID NO: 982 - RNA, 19 nt, synthetic construct
  source 1..19: mol_type = other RNA
aggacagtgacgacttaga

SEQ ID NO: 983 - RNA, 19 nt, synthetic construct
  source 1..19: mol_type = other RNA
ggattctgtagaggtggca

SEQ ID NO: 984 - RNA, 19 nt, synthetic construct
  source 1..19: mol_type = other RNA
ggacagtgacgacttagaa

SEQ ID NO: 985 - RNA, 19 nt, synthetic construct
  source 1..19: mol_type = other RNA
gattctgtagaggtggcag

SEQ ID NO: 986 - RNA, 19 nt, synthetic construct
  source 1..19: mol_type = other RNA
gacagtgacgacttagaag

SEQ ID NO: 987 - RNA, 19 nt, synthetic construct
  source 1..19: mol_type = other RNA
attctgtagaggtggcaga

SEQ ID NO: 988 - RNA, 19 nt, synthetic construct
  source 1..19: mol_type = other RNA
acagtgacgacttagaagc

SEQ ID NO: 989 - RNA, 19 nt, synthetic construct
  source 1..19: mol_type = other RNA
ttctgtagaggtggcagag

SEQ ID NO: 990 - RNA, 19 nt, synthetic construct
  source 1..19: mol_type = other RNA
cagtgacgacttagaagcc

SEQ ID NO: 991 - RNA, 19 nt, synthetic construct
  source 1..19: mol_type = other RNA
tctgtagaggtggcagagg

SEQ ID NO: 992 - RNA, 19 nt, synthetic construct
  source 1..19: mol_type = other RNA
agtgacgacttagaagccc

SEQ ID NO: 993 - RNA, 19 nt, synthetic construct
  source 1..19: mol_type = other RNA
ctgtagaggtggcagaggc

SEQ ID NO: 994 - RNA, 19 nt, synthetic construct
  source 1..19: mol_type = other RNA
gtgacgacttagaagcccc

SEQ ID NO: 995 - RNA, 19 nt, synthetic construct
  source 1..19: mol_type = other RNA
tgtagaggtggcagaggcc

SEQ ID NO: 996 - RNA, 19 nt, synthetic construct
  source 1..19: mol_type = other RNA
tgacgacttagaagcccct

SEQ ID NO: 997 - RNA, 19 nt, synthetic construct
  source 1..19: mol_type = other RNA
gtagaggtggcagaggcct

SEQ ID NO: 998 - RNA, 19 nt, synthetic construct
  source 1..19: mol_type = other RNA
gacgacttagaagcccctc

SEQ ID NO: 999 - RNA, 19 nt, synthetic construct
  source 1..19: mol_type = other RNA
tagaggtggcagaggcctg

SEQ ID NO: 1000 - RNA, 19 nt, synthetic construct
  source 1..19: mol_type = other RNA
acgacttagaagcccctct

SEQ ID NO: 1001 - RNA, 19 nt, synthetic construct
  source 1..19: mol_type = other RNA
agaggtggcagaggcctga

SEQ ID NO: 1002 - RNA, 19 nt, synthetic construct
  source 1..19: mol_type = other RNA
cgacttagaagcccctctg

SEQ ID NO: 1003 - RNA, 19 nt, synthetic construct
  source 1..19: mol_type = other RNA
gaggtggcagaggcctgac

SEQ ID NO: 1004 - RNA, 19 nt, synthetic construct
  source 1..19: mol_type = other RNA
gacttagaagcccctctga

SEQ ID NO: 1005 - RNA, 19 nt, synthetic construct
  source 1..19: mol_type = other RNA
aggtggcagaggcctgacc

SEQ ID NO: 1006 - RNA, 19 nt, synthetic construct
  source 1..19: mol_type = other RNA
acttagaagcccctctgat

SEQ ID NO: 1007 - RNA, 19 nt, synthetic construct
  source 1..19: mol_type = other RNA
ggtggcagaggcctgaccc

SEQ ID NO: 1008 - RNA, 19 nt, synthetic construct
  source 1..19: mol_type = other RNA
cttagaagcccctctgatg

SEQ ID NO: 1009 - RNA, 19 nt, synthetic construct
  source 1..19: mol_type = other RNA
gtggcagaggcctgaccca

SEQ ID NO: 1010 - RNA, 19 nt, synthetic construct
  source 1..19: mol_type = other RNA
ttagaagcccctctgatgc

SEQ ID NO: 1011 - RNA, 19 nt, synthetic construct
  source 1..19: mol_type = other RNA
tggcagaggcctgacccag

SEQ ID NO: 1012 - RNA, 19 nt, synthetic construct
  source 1..19: mol_type = other RNA
tagaagcccctctgatgct

SEQ ID NO: 1013 - RNA, 19 nt, synthetic construct
  source 1..19: mol_type = other RNA
ggcagaggcctgacccaga

SEQ ID NO: 1014 - RNA, 19 nt, synthetic construct
  source 1..19: mol_type = other RNA
agaagcccctctgatgcta

SEQ ID NO: 1015 - RNA, 19 nt, synthetic construct
  source 1..19: mol_type = other RNA
gcagaggcctgacccagag

SEQ ID NO: 1016 - RNA, 19 nt, synthetic construct
  source 1..19: mol_type = other RNA
gaagcccctctgatgctat

SEQ ID NO: 1017 - RNA, 19 nt, synthetic construct
  source 1..19: mol_type = other RNA
cagaggcctgacccagagg

SEQ ID NO: 1018 - RNA, 19 nt, synthetic construct
  source 1..19: mol_type = other RNA
aagcccctctgatgctatc

SEQ ID NO: 1019 - RNA, 19 nt, synthetic construct
  source 1..19: mol_type = other RNA
agaggcctgacccagaggc

SEQ ID NO: 1020 - RNA, 19 nt, synthetic construct
  source 1..19: mol_type = other RNA
agcccctctgatgctatcg

SEQ ID NO: 1021 - RNA, 19 nt, synthetic construct
  source 1..19: mol_type = other RNA
gaggcctgacccagaggcc

SEQ ID NO: 1022 - RNA, 19 nt, synthetic construct
  source 1..19: mol_type = other RNA
gcccctctgatgctatcgt

SEQ ID NO: 1023 - RNA, 19 nt, synthetic construct
  source 1..19: mol_type = other RNA
aggcctgacccagaggcct

SEQ ID NO: 1024 - RNA, 19 nt, synthetic construct
  source 1..19: mol_type = other RNA
cccctctgatgctatcgtc

SEQ ID NO: 1025 - RNA, 19 nt, synthetic construct
  source 1..19: mol_type = other RNA
ggcctgacccagaggcctg

SEQ ID NO: 1026 - RNA, 19 nt, synthetic construct
  source 1..19: mol_type = other RNA
ccctctgatgctatcgtct

SEQ ID NO: 1027 - RNA, 19 nt, synthetic construct
  source 1..19: mol_type = other RNA
gcctgacccagaggcctga

SEQ ID NO: 1028 - RNA, 19 nt, synthetic construct
  source 1..19: mol_type = other RNA
cctctgatgctatcgtctc

SEQ ID NO: 1029 - RNA, 19 nt, synthetic construct
  source 1..19: mol_type = other RNA
cctgacccagaggcctgac

SEQ ID NO: 1030 - RNA, 19 nt, synthetic construct
  source 1..19: mol_type = other RNA
ctctgatgctatcgtctca

SEQ ID NO: 1031 - RNA, 19 nt, synthetic construct
  source 1..19: mol_type = other RNA
ctgacccagaggcctgaca

SEQ ID NO: 1032 - RNA, 19 nt, synthetic construct
  source 1..19: mol_type = other RNA
tctgatgctatcgtctcat

SEQ ID NO: 1033 - RNA, 19 nt, synthetic construct
  source 1..19: mol_type = other RNA
tgacccagaggcctgacag

SEQ ID NO: 1034 - RNA, 19 nt, synthetic construct
  source 1..19: mol_type = other RNA
ctgatgctatcgtctcatc

SEQ ID NO: 1035 - RNA, 19 nt, synthetic construct
  source 1..19: mol_type = other RNA
gacccagaggcctgacagt

SEQ ID NO: 1036 - RNA, 19 nt, synthetic construct
  source 1..19: mol_type = other RNA
tgatgctatcgtctcatct

SEQ ID NO: 1037 - RNA, 19 nt, synthetic construct
  source 1..19: mol_type = other RNA
acccagaggcctgacagtc

SEQ ID NO: 1038 - RNA, 19 nt, synthetic construct
  source 1..19: mol_type = other RNA
gatgctatcgtctcatctg

SEQ ID NO: 1039 - RNA, 19 nt, synthetic construct
  source 1..19: mol_type = other RNA
cccagaggcctgacagtca

SEQ ID NO: 1040 - RNA, 19 nt, synthetic construct
  source 1..19: mol_type = other RNA
atgctatcgtctcatctgg

SEQ ID NO: 1041 - RNA, 19 nt, synthetic construct
  source 1..19: mol_type = other RNA
ccagaggcctgacagtcag

SEQ ID NO: 1042 - RNA, 19 nt, synthetic construct
  source 1..19: mol_type = other RNA
tgctatcgtctcatctgga

SEQ ID NO: 1043 - RNA, 19 nt, synthetic construct
  source 1..19: mol_type = other RNA
cagaggcctgacagtcagt

SEQ ID NO: 1044 - RNA, 19 nt, synthetic construct
  source 1..19: mol_type = other RNA
gctatcgtctcatctggaa

SEQ ID NO: 1045 - RNA, 19 nt, synthetic construct
  source 1..19: mol_type = other RNA
agaggcctgacagtcagtc

SEQ ID NO: 1046 - RNA, 19 nt, synthetic construct
  source 1..19: mol_type = other RNA
ctatcgtctcatctggaag

SEQ ID NO: 1047 - RNA, 19 nt, synthetic construct
  source 1..19: mol_type = other RNA
gaggcctgacagtcagtcc

SEQ ID NO: 1048 - RNA, 19 nt, synthetic construct
  source 1..19: mol_type = other RNA
tatcgtctcatctggaaga

SEQ ID NO: 1049 - RNA, 19 nt, synthetic construct
  source 1..19: mol_type = other RNA
aggcctgacagtcagtcca

SEQ ID NO: 1050 - RNA, 19 nt, synthetic construct
  source 1..19: mol_type = other RNA
atcgtctcatctggaagag

SEQ ID NO: 1051 - RNA, 19 nt, synthetic construct
  source 1..19: mol_type = other RNA
ggcctgacagtcagtccat

SEQ ID NO: 1052 - RNA, 19 nt, synthetic construct
  source 1..19: mol_type = other RNA
tcgtctcatctggaagaga

SEQ ID NO: 1053 - RNA, 19 nt, synthetic construct
  source 1..19: mol_type = other RNA
gcctgacagtcagtccatg

SEQ ID NO: 1054 - RNA, 19 nt, synthetic construct
  source 1..19: mol_type = other RNA
cgtctcatctggaagagat

SEQ ID NO: 1055 - RNA, 19 nt, synthetic construct
  source 1..19: mol_type = other RNA
cctgacagtcagtccatgc

SEQ ID NO: 1056 - RNA, 19 nt, synthetic construct
  source 1..19: mol_type = other RNA
gtctcatctggaagagatg

SEQ ID NO: 1057 - RNA, 19 nt, synthetic construct
  source 1..19: mol_type = other RNA
ctgacagtcagtccatgca

SEQ ID NO: 1058 - RNA, 19 nt, synthetic construct
  source 1..19: mol_type = other RNA
tctcatctggaagagatgg

SEQ ID NO: 1059 - RNA, 19 nt, synthetic construct
  source 1..19: mol_type = other RNA
tgacagtcagtccatgcat

SEQ ID NO: 1060 - RNA, 19 nt, synthetic construct
  source 1..19: mol_type = other RNA
ctcatctggaagagatggt

SEQ ID NO: 1061 - RNA, 19 nt, synthetic construct
  source 1..19: mol_type = other RNA
gacagtcagtccatgcatg

SEQ ID NO: 1062 - RNA, 19 nt, synthetic construct
  source 1..19: mol_type = other RNA
tcatctggaagagatggtt

SEQ ID NO: 1063 - RNA, 19 nt, synthetic construct
  source 1..19: mol_type = other RNA
acagtcagtccatgcatgg

SEQ ID NO: 1064 - RNA, 19 nt, synthetic construct
  source 1..19: mol_type = other RNA
catctggaagagatggttg

SEQ ID NO: 1065 - RNA, 19 nt, synthetic construct
  source 1..19: mol_type = other RNA
cagtcagtccatgcatggt

SEQ ID NO: 1066 - RNA, 19 nt, synthetic construct
  source 1..19: mol_type = other RNA
atctggaagagatggttga

SEQ ID NO: 1067 - RNA, 19 nt, synthetic construct
  source 1..19: mol_type = other RNA
agtcagtccatgcatggta

SEQ ID NO: 1068 - RNA, 19 nt, synthetic construct
  source 1..19: mol_type = other RNA
tctggaagagatggttgac

SEQ ID NO: 1069 - RNA, 19 nt, synthetic construct
  source 1..19: mol_type = other RNA
gtcagtccatgcatggtat

SEQ ID NO: 1070 - RNA, 19 nt, synthetic construct
  source 1..19: mol_type = other RNA
ctggaagagatggttgacc

SEQ ID NO: 1071 - RNA, 19 nt, synthetic construct
  source 1..19: mol_type = other RNA
tcagtccatgcatggtata

SEQ ID NO: 1072 - RNA, 19 nt, synthetic construct
  source 1..19: mol_type = other RNA
tggaagagatggttgaccc

SEQ ID NO: 1073 - RNA, 19 nt, synthetic construct
  source 1..19: mol_type = other RNA
cagtccatgcatggtatag

SEQ ID NO: 1074 - RNA, 19 nt, synthetic construct
  source 1..19: mol_type = other RNA
ggaagagatggttgaccca

SEQ ID NO: 1075 - RNA, 19 nt, synthetic construct
  source 1..19: mol_type = other RNA
agtccatgcatggtatagc

SEQ ID NO: 1076 - RNA, 19 nt, synthetic construct
  source 1..19: mol_type = other RNA
gaagagatggttgacccag

SEQ ID NO: 1077 - RNA, 19 nt, synthetic construct
  source 1..19: mol_type = other RNA
gtccatgcatggtatagcc

SEQ ID NO: 1078 - RNA, 19 nt, synthetic construct
  source 1..19: mol_type = other RNA
aagagatggttgacccaga

SEQ ID NO: 1079 - RNA, 19 nt, synthetic construct
  source 1..19: mol_type = other RNA
tccatgcatggtatagcca

SEQ ID NO: 1080 - RNA, 19 nt, synthetic construct
  source 1..19: mol_type = other RNA
agagatggttgacccagag

SEQ ID NO: 1081 - RNA, 19 nt, synthetic construct
  source 1..19: mol_type = other RNA
ccatgcatggtatagccac

SEQ ID NO: 1082 - RNA, 19 nt, synthetic construct
  source 1..19: mol_type = other RNA
gagatggttgacccagagg

SEQ ID NO: 1083 - RNA, 19 nt, synthetic construct
  source 1..19: mol_type = other RNA
catgcatggtatagccacc

SEQ ID NO: 1084 - RNA, 19 nt, synthetic construct
  source 1..19: mol_type = other RNA
agatggttgacccagagga

SEQ ID NO: 1085 - RNA, 19 nt, synthetic construct
  source 1..19: mol_type = other RNA
atgcatggtatagccaccg

SEQ ID NO: 1086 - RNA, 19 nt, synthetic construct
  source 1..19: mol_type = other RNA
gatggttgacccagaggat

SEQ ID NO: 1087 - RNA, 19 nt, synthetic construct
  source 1..19: mol_type = other RNA
tgcatggtatagccaccgc

SEQ ID NO: 1088 - RNA, 19 nt, synthetic construct
  source 1..19: mol_type = other RNA
atggttgacccagaggatc

SEQ ID NO: 1089 - RNA, 19 nt, synthetic construct
  source 1..19: mol_type = other RNA
gcatggtatagccaccgcc

SEQ ID NO: 1090 - RNA, 19 nt, synthetic construct
  source 1..19: mol_type = other RNA
tggttgacccagaggatcc

SEQ ID NO: 1091 - RNA, 19 nt, synthetic construct
  source 1..19: mol_type = other RNA
catggtatagccaccgcca

SEQ ID NO: 1092 - RNA, 19 nt, synthetic construct
  source 1..19: mol_type = other RNA
ggttgacccagaggatcct

SEQ ID NO: 1093 - RNA, 19 nt, synthetic construct
  source 1..19: mol_type = other RNA
atggtatagccaccgccac

SEQ ID NO: 1094 - RNA, 19 nt, synthetic construct
  source 1..19: mol_type = other RNA
gttgacccagaggatcctg

SEQ ID NO: 1095 - RNA, 19 nt, synthetic construct
  source 1..19: mol_type = other RNA
tggtatagccaccgccact

SEQ ID NO: 1096 - RNA, 19 nt, synthetic construct
  source 1..19: mol_type = other RNA
ttgacccagaggatcctga

SEQ ID NO: 1097 - RNA, 19 nt, synthetic construct
  source 1..19: mol_type = other RNA
ggtatagccaccgccactt

SEQ ID NO: 1098 - RNA, 19 nt, synthetic construct
  source 1..19: mol_type = other RNA
tgacccagaggatcctgat

SEQ ID NO: 1099 - RNA, 19 nt, synthetic construct
  source 1..19: mol_type = other RNA
gtatagccaccgccacttg

SEQ ID NO: 1100 - RNA, 19 nt, synthetic construct
  source 1..19: mol_type = other RNA
gacccagaggatcctgata

SEQ ID NO: 1101 - RNA, 19 nt, synthetic construct
  source 1..19: mol_type = other RNA
tatagccaccgccacttgt

SEQ ID NO: 1102 - RNA, 19 nt, synthetic construct
  source 1..19: mol_type = other RNA
acccagaggatcctgataa

SEQ ID NO: 1103 - RNA, 19 nt, synthetic construct
  source 1..19: mol_type = other RNA
atagccaccgccacttgtc

SEQ ID NO: 1104 - RNA, 19 nt, synthetic construct
  source 1..19: mol_type = other RNA
cccagaggatcctgataat

SEQ ID NO: 1105 - RNA, 19 nt, synthetic construct
  source 1..19: mol_type = other RNA
tagccaccgccacttgtcc

SEQ ID NO: 1106 - RNA, 19 nt, synthetic construct
  source 1..19: mol_type = other RNA
ccagaggatcctgataatg

SEQ ID NO: 1107 - RNA, 19 nt, synthetic construct
  source 1..19: mol_type = other RNA
agccaccgccacttgtcct

SEQ ID NO: 1108 - RNA, 19 nt, synthetic construct
  source 1..19: mol_type = other RNA
cagaggatcctgataatgt

SEQ ID NO: 1109 - RNA, 19 nt, synthetic construct
  source 1..19: mol_type = other RNA
gccaccgccacttgtcctg

SEQ ID NO: 1110 - RNA, 19 nt, synthetic construct
  source 1..19: mol_type = other RNA
agaggatcctgataatgtg

SEQ ID NO: 1111 - RNA, 19 nt, synthetic construct
  source 1..19: mol_type = other RNA
ccaccgccacttgtcctgg

SEQ ID NO: 1112 - RNA, 19 nt, synthetic construct
  source 1..19: mol_type = other RNA
gaggatcctgataatgtgc

SEQ ID NO: 1113 - RNA, 19 nt, synthetic construct
  source 1..19: mol_type = other RNA
caccgccacttgtcctggg

SEQ ID NO: 1114 - RNA, 19 nt, synthetic construct
  source 1..19: mol_type = other RNA
aggatcctgataatgtgca

SEQ ID NO: 1115 - RNA, 19 nt, synthetic construct
  source 1..19: mol_type = other RNA
accgccacttgtcctgggc

SEQ ID NO: 1116 - RNA, 19 nt, synthetic construct
  source 1..19: mol_type = other RNA
ggatcctgataatgtgcaa

SEQ ID NO: 1117 - RNA, 19 nt, synthetic construct
  source 1..19: mol_type = other RNA
ccgccacttgtcctgggcg

SEQ ID NO: 1118 - RNA, 19 nt, synthetic construct
  source 1..19: mol_type = other RNA
gatcctgataatgtgcaat

SEQ ID NO: 1119 - RNA, 19 nt, synthetic construct
  source 1..19: mol_type = other RNA
cgccacttgtcctgggcgc

SEQ ID NO: 1120 - RNA, 19 nt, synthetic construct
  source 1..19: mol_type = other RNA
atcctgataatgtgcaatc

SEQ ID NO: 1121 - RNA, 19 nt, synthetic construct
  source 1..19: mol_type = other RNA
gccacttgtcctgggcgct

SEQ ID NO: 1122 - RNA, 19 nt, synthetic construct
  source 1..19: mol_type = other RNA
tcctgataatgtgcaatca

SEQ ID NO: 1123 - RNA, 19 nt, synthetic construct
  source 1..19: mol_type = other RNA
ccacttgtcctgggcgctg

SEQ ID NO: 1124 - RNA, 19 nt, synthetic construct
  source 1..19: mol_type = other RNA
cctgataatgtgcaatcaa

SEQ ID NO: 1125 - RNA, 19 nt, synthetic construct
  source 1..19: mol_type = other RNA
cacttgtcctgggcgctgc

SEQ ID NO: 1126 - RNA, 19 nt, synthetic construct
  source 1..19: mol_type = other RNA
ctgataatgtgcaatcaaa

SEQ ID NO: 1127 - RNA, 19 nt, synthetic construct
  source 1..19: mol_type = other RNA
acttgtcctgggcgctgcc

SEQ ID NO: 1128 - RNA, 19 nt, synthetic construct
  source 1..19: mol_type = other RNA
tgataatgtgcaatcaaac

SEQ ID NO: 1129 - RNA, 19 nt, synthetic construct
  source 1..19: mol_type = other RNA
cttgtcctgggcgctgcct

SEQ ID NO: 1130 - RNA, 19 nt, synthetic construct
  source 1..19: mol_type = other RNA
gataatgtgcaatcaaacc

SEQ ID NO: 1131 - RNA, 19 nt, synthetic construct
  source 1..19: mol_type = other RNA
ttgtcctgggcgctgcctc

SEQ ID NO: 1132 - RNA, 19 nt, synthetic construct
  source 1..19: mol_type = other RNA
ataatgtgcaatcaaacca

SEQ ID NO: 1133 - RNA, 19 nt, synthetic construct
  source 1..19: mol_type = other RNA
tgtcctgggcgctgcctca

SEQ ID NO: 1134 - RNA, 19 nt, synthetic construct
  source 1..19: mol_type = other RNA
taatgtgcaatcaaaccat

SEQ ID NO: 1135 - RNA, 19 nt, synthetic construct
  source 1..19: mol_type = other RNA
gtcctgggcgctgcctcag

SEQ ID NO: 1136 - RNA, 19 nt, synthetic construct
  source 1..19: mol_type = other RNA
aatgtgcaatcaaaccatt

SEQ ID NO: 1137 - RNA, 19 nt, synthetic construct
  source 1..19: mol_type = other RNA
tcctgggcgctgcctcagt

SEQ ID NO: 1138 - RNA, 19 nt, synthetic construct
  source 1..19: mol_type = other RNA
atgtgcaatcaaaccattt

SEQ ID NO: 1139 - RNA, 19 nt, synthetic construct
  source 1..19: mol_type = other RNA
cctgggcgctgcctcagta

SEQ ID NO: 1140 - RNA, 19 nt, synthetic construct
  source 1..19: mol_type = other RNA
tgtgcaatcaaaccatttg

SEQ ID NO: 1141 - RNA, 19 nt, synthetic construct
  source 1..19: mol_type = other RNA
ctgggcgctgcctcagtat

SEQ ID NO: 1142 - RNA, 19 nt, synthetic construct
  source 1..19: mol_type = other RNA
gtgcaatcaaaccatttgc

SEQ ID NO: 1143 - RNA, 19 nt, synthetic construct
  source 1..19: mol_type = other RNA
tgggcgctgcctcagtatc

SEQ ID NO: 1144 - RNA, 19 nt, synthetic construct
  source 1..19: mol_type = other RNA
tgcaatcaaaccatttgct

SEQ ID NO: 1145 - RNA, 19 nt, synthetic construct
  source 1..19: mol_type = other RNA
gggcgctgcctcagtatcg

SEQ ID NO: 1146 - RNA, 19 nt, synthetic construct
  source 1..19: mol_type = other RNA
gcaatcaaaccatttgctg

SEQ ID NO: 1147 - RNA, 19 nt, synthetic construct
  source 1..19: mol_type = other RNA
ggcgctgcctcagtatcgc

SEQ ID NO: 1148 - RNA, 19 nt, synthetic construct
  source 1..19: mol_type = other RNA
caatcaaaccatttgctgg

SEQ ID NO: 1149 - RNA, 19 nt, synthetic construct
  source 1..19: mol_type = other RNA
gcgctgcctcagtatcgct

SEQ ID NO: 1150 - RNA, 19 nt, synthetic construct
  source 1..19: mol_type = other RNA
aatcaaaccatttgctggc

SEQ ID NO: 1151 - RNA, 19 nt, synthetic construct
  source 1..19: mol_type = other RNA
cgctgcctcagtatcgcta

SEQ ID NO: 1152 - RNA, 19 nt, synthetic construct
  source 1..19: mol_type = other RNA
atcaaaccatttgctggcc

SEQ ID NO: 1153 - RNA, 19 nt, synthetic construct
  source 1..19: mol_type = other RNA
gctgcctcagtatcgctat

SEQ ID NO: 1154 - RNA, 19 nt, synthetic construct
  source 1..19: mol_type = other RNA
tcaaaccatttgctggcca

SEQ ID NO: 1155 - RNA, 19 nt, synthetic construct
  source 1..19: mol_type = other RNA
ctgcctcagtatcgctatc

SEQ ID NO: 1156 - RNA, 19 nt, synthetic construct
  source 1..19: mol_type = other RNA
caaaccatttgctggccag

SEQ ID NO: 1157 - RNA, 19 nt, synthetic construct
  source 1..19: mol_type = other RNA
tgcctcagtatcgctatca

SEQ ID NO: 1158 - RNA, 19 nt, synthetic construct
  source 1..19: mol_type = other RNA
aaaccatttgctggccagc

SEQ ID NO: 1159 - RNA, 19 nt, synthetic construct
  source 1..19: mol_type = other RNA
gcctcagtatcgctatcac

SEQ ID NO: 1160 - RNA, 19 nt, synthetic construct
  source 1..19: mol_type = other RNA
aaccatttgctggccagcg

SEQ ID NO: 1161 - RNA, 19 nt, synthetic construct
  source 1..19: mol_type = other RNA
cctcagtatcgctatcact

SEQ ID NO: 1162 - RNA, 19 nt, synthetic construct
  source 1..19: mol_type = other RNA
accatttgctggccagcgg

SEQ ID NO: 1163 - RNA, 19 nt, synthetic construct
  source 1..19: mol_type = other RNA
ctcagtatcgctatcactt

SEQ ID NO: 1164 - RNA, 19 nt, synthetic construct
  source 1..19: mol_type = other RNA
ccatttgctggccagcggg

SEQ ID NO: 1165 - RNA, 19 nt, synthetic construct
  source 1..19: mol_type = other RNA
tcagtatcgctatcacttt

SEQ ID NO: 1166 - RNA, 19 nt, synthetic construct
  source 1..19: mol_type = other RNA
catttgctggccagcgggg

SEQ ID NO: 1167 - RNA, 19 nt, synthetic construct
  source 1..19: mol_type = other RNA
cagtatcgctatcactttc

SEQ ID NO: 1168 - RNA, 19 nt, synthetic construct
  source 1..19: mol_type = other RNA
atttgctggccagcgggga

SEQ ID NO: 1169 - RNA, 19 nt, synthetic construct
  source 1..19: mol_type = other RNA
agtatcgctatcactttca

SEQ ID NO: 1170 - RNA, 19 nt, synthetic construct
  source 1..19: mol_type = other RNA
tttgctggccagcggggaa

SEQ ID NO: 1171 - RNA, 19 nt, synthetic construct
  source 1..19: mol_type = other RNA
gtatcgctatcactttcat

SEQ ID NO: 1172 - RNA, 19 nt, synthetic construct
  source 1..19: mol_type = other RNA
ttgctggccagcggggaag

SEQ ID NO: 1173 - RNA, 19 nt, synthetic construct
  source 1..19: mol_type = other RNA
tatcgctatcactttcatc

SEQ ID NO: 1174 - RNA, 19 nt, synthetic construct
  source 1..19: mol_type = other RNA
tgctggccagcggggaagg

SEQ ID NO: 1175 - RNA, 19 nt, synthetic construct
  source 1..19: mol_type = other RNA
atcgctatcactttcatca

SEQ ID NO: 1176 - RNA, 19 nt, synthetic construct
  source 1..19: mol_type = other RNA
gctggccagcggggaaggg

SEQ ID NO: 1177 - RNA, 19 nt, synthetic construct
  source 1..19: mol_type = other RNA
tcgctatcactttcatcat

SEQ ID NO: 1178 - RNA, 19 nt, synthetic construct
  source 1..19: mol_type = other RNA
ctggccagcggggaaggga

SEQ ID NO: 1179 - RNA, 19 nt, synthetic construct
  source 1..19: mol_type = other RNA
cgctatcactttcatcatc

SEQ ID NO: 1180 - RNA, 19 nt, synthetic construct
  source 1..19: mol_type = other RNA
tggccagcggggaagggac

SEQ ID NO: 1181 - RNA, 19 nt, synthetic construct
  source 1..19: mol_type = other RNA
gctatcactttcatcatca

SEQ ID NO: 1182 - RNA, 19 nt, synthetic construct
  source 1..19: mol_type = other RNA
ggccagcggggaagggaca

SEQ ID NO: 1183 - RNA, 19 nt, synthetic construct
  source 1..19: mol_type = other RNA
ctatcactttcatcatcat

SEQ ID NO: 1184 - RNA, 19 nt, synthetic construct
  source 1..19: mol_type = other RNA
gccagcggggaagggacac

SEQ ID NO: 1185 - RNA, 19 nt, synthetic construct
  source 1..19: mol_type = other RNA
tatcactttcatcatcata

SEQ ID NO: 1186 - RNA, 19 nt, synthetic construct
  source 1..19: mol_type = other RNA
ccagcggggaagggacaca

SEQ ID NO: 1187 - RNA, 19 nt, synthetic construct
  source 1..19: mol_type = other RNA
atcactttcatcatcataa

SEQ ID NO: 1188 - RNA, 19 nt, synthetic construct
  source 1..19: mol_type = other RNA
cagcggggaagggacacag

SEQ ID NO: 1189 - RNA, 19 nt, synthetic construct
  source 1..19: mol_type = other RNA
tcactttcatcatcataat

SEQ ID NO: 1190 - RNA, 19 nt, synthetic construct
  source 1..19: mol_type = other RNA
agcggggaagggacacagc

SEQ ID NO: 1191 - RNA, 19 nt, synthetic construct
  source 1..19: mol_type = other RNA
cactttcatcatcataatt

SEQ ID NO: 1192 - RNA, 19 nt, synthetic construct
  source 1..19: mol_type = other RNA
gcggggaagggacacagcc

SEQ ID NO: 1193 - RNA, 19 nt, synthetic construct
  source 1..19: mol_type = other RNA
actttcatcatcataatta

SEQ ID NO: 1194 - RNA, 19 nt, synthetic construct
  source 1..19: mol_type = other RNA
cggggaagggacacagcca

SEQ ID NO: 1195 - RNA, 19 nt, synthetic construct
  source 1..19: mol_type = other RNA
ctttcatcatcataattat

SEQ ID NO: 1196 - RNA, 19 nt, synthetic construct
  source 1..19: mol_type = other RNA
ggggaagggacacagccaa

SEQ ID NO: 1197 - RNA, 19 nt, synthetic construct
  source 1..19: mol_type = other RNA
tttcatcatcataattata

SEQ ID NO: 1198 - RNA, 19 nt, synthetic construct
  source 1..19: mol_type = other RNA
gggaagggacacagccaac

SEQ ID NO: 1199 - RNA, 19 nt, synthetic construct
  source 1..19: mol_type = other RNA
ttcatcatcataattataa

SEQ ID NO: 1200 - RNA, 19 nt, synthetic construct
  source 1..19: mol_type = other RNA
ggaagggacacagccaacc

SEQ ID NO: 1201 - RNA, 19 nt, synthetic construct
  source 1..19: mol_type = other RNA
tcatcatcataattataat

SEQ ID NO: 1202 - RNA, 19 nt, synthetic construct
  source 1..19: mol_type = other RNA
gaagggacacagccaacct

SEQ ID NO: 1203 - RNA, 19 nt, synthetic construct
  source 1..19: mol_type = other RNA
catcatcataattataatc

SEQ ID NO: 1204 - RNA, 19 nt, synthetic construct
  source 1..19: mol_type = other RNA
aagggacacagccaacctt

SEQ ID NO: 1205 - RNA, 19 nt, synthetic construct
  source 1..19: mol_type = other RNA
atcatcataattataatcc

SEQ ID NO: 1206 - RNA, 19 nt, synthetic construct
  source 1..19: mol_type = other RNA
agggacacagccaaccttt

SEQ ID NO: 1207 - RNA, 19 nt, synthetic construct
  source 1..19: mol_type = other RNA
tcatcataattataatccc

SEQ ID NO: 1208 - RNA, 19 nt, synthetic construct
  source 1..19: mol_type = other RNA
gggacacagccaacctttc

SEQ ID NO: 1209 - RNA, 19 nt, synthetic construct
  source 1..19: mol_type = other RNA
catcataattataatccca

SEQ ID NO: 1210 - RNA, 19 nt, synthetic construct
  source 1..19: mol_type = other RNA
ggacacagccaacctttcc

SEQ ID NO: 1211 - RNA, 19 nt, synthetic construct
  source 1..19: mol_type = other RNA
atcataattataatcccac

SEQ ID NO: 1212 - RNA, 19 nt, synthetic construct
  source 1..19: mol_type = other RNA
gacacagccaacctttccc

SEQ ID NO: 1213 - RNA, 19 nt, synthetic construct
  source 1..19: mol_type = other RNA
tcataattataatcccaca

SEQ ID NO: 1214 - RNA, 19 nt, synthetic construct
  source 1..19: mol_type = other RNA
acacagccaacctttccca

SEQ ID NO: 1215 - RNA, 19 nt, synthetic construct
  source 1..19: mol_type = other RNA
cataattataatcccacac

SEQ ID NO: 1216 - RNA, 19 nt, synthetic construct
  source 1..19: mol_type = other RNA
cacagccaacctttcccag

SEQ ID NO: 1217 - RNA, 19 nt, synthetic construct
  source 1..19: mol_type = other RNA
ataattataatcccacact

SEQ ID NO: 1218 - RNA, 19 nt, synthetic construct
  source 1..19: mol_type = other RNA
acagccaacctttcccagc

SEQ ID NO: 1219 - RNA, 19 nt, synthetic construct
  source 1..19: mol_type = other RNA
taattataatcccacactt

SEQ ID NO: 1220 - RNA, 19 nt, synthetic construct
  source 1..19: mol_type = other RNA
cagccaacctttcccagcc

SEQ ID NO: 1221 - RNA, 19 nt, synthetic construct
  source 1..19: mol_type = other RNA
aattataatcccacacttt

SEQ ID NO: 1222 - RNA, 19 nt, synthetic construct
  source 1..19: mol_type = other RNA
agccaacctttcccagccc

SEQ ID NO: 1223 - RNA, 19 nt, synthetic construct
  source 1..19: mol_type = other RNA
attataatcccacactttc

SEQ ID NO: 1224 - RNA, 19 nt, synthetic construct
  source 1..19: mol_type = other RNA
gccaacctttcccagcccc

SEQ ID NO: 1225 - RNA, 19 nt, synthetic construct
  source 1..19: mol_type = other RNA
ttataatcccacactttct

SEQ ID NO: 1226 - RNA, 19 nt, synthetic construct
  source 1..19: mol_type = other RNA
ccaacctttcccagcccct

SEQ ID NO: 1227 - RNA, 19 nt, synthetic construct
  source 1..19: mol_type = other RNA
tataatcccacactttctt

SEQ ID NO: 1228 - RNA, 19 nt, synthetic construct
  source 1..19: mol_type = other RNA
caacctttcccagcccctc

SEQ ID NO: 1229 - RNA, 19 nt, synthetic construct
  source 1..19: mol_type = other RNA
ataatcccacactttcttc

SEQ ID NO: 1230 - RNA, 19 nt, synthetic construct
  source 1..19: mol_type = other RNA
aacctttcccagcccctct

SEQ ID NO: 1231 - RNA, 19 nt, synthetic construct
  source 1..19: mol_type = other RNA
taatcccacactttcttct

SEQ ID NO: 1232 - RNA, 19 nt, synthetic construct
  source 1..19: mol_type = other RNA
acctttcccagcccctctt

SEQ ID NO: 1233 - RNA, 19 nt, synthetic construct
  source 1..19: mol_type = other RNA
aatcccacactttcttctt

SEQ ID NO: 1234 - RNA, 19 nt, synthetic construct
  source 1..19: mol_type = other RNA
cctttcccagcccctcttc

SEQ ID NO: 1235 - RNA, 19 nt, synthetic construct
  source 1..19: mol_type = other RNA
atcccacactttcttcttt

SEQ ID NO: 1236 - RNA, 19 nt, synthetic construct
  source 1..19: mol_type = other RNA
ctttcccagcccctcttca

SEQ ID NO: 1237 - RNA, 19 nt, synthetic construct
  source 1..19: mol_type = other RNA
tcccacactttcttctttc

SEQ ID NO: 1238 - RNA, 19 nt, synthetic construct
  source 1..19: mol_type = other RNA
tttcccagcccctcttcag

SEQ ID NO: 1239 - RNA, 19 nt, synthetic construct
  source 1..19: mol_type = other RNA
cccacactttcttctttct

SEQ ID NO: 1240 - RNA, 19 nt, synthetic construct
  source 1..19: mol_type = other RNA
ttcccagcccctcttcaga

SEQ ID NO: 1241 - RNA, 19 nt, synthetic construct
  source 1..19: mol_type = other RNA
ccacactttcttctttctg

SEQ ID NO: 1242 - RNA, 19 nt, synthetic construct
  source 1..19: mol_type = other RNA
tcccagcccctcttcagag

SEQ ID NO: 1243 - RNA, 19 nt, synthetic construct
  source 1..19: mol_type = other RNA
cacactttcttctttctgt

SEQ ID NO: 1244 - RNA, 19 nt, synthetic construct
  source 1..19: mol_type = other RNA
cccagcccctcttcagagg

SEQ ID NO: 1245 - RNA, 19 nt, synthetic construct
  source 1..19: mol_type = other RNA
acactttcttctttctgtt

SEQ ID NO: 1246 - RNA, 19 nt, synthetic construct
  source 1..19: mol_type = other RNA
ccagcccctcttcagaggg

SEQ ID NO: 1247 - RNA, 19 nt, synthetic construct
  source 1..19: mol_type = other RNA
cactttcttctttctgttg

SEQ ID NO: 1248 - RNA, 19 nt, synthetic construct
  source 1..19: mol_type = other RNA
cagcccctcttcagagggc

SEQ ID NO: 1249 - RNA, 19 nt, synthetic construct
  source 1..19: mol_type = other RNA
actttcttctttctgttga

SEQ ID NO: 1250 - RNA, 19 nt, synthetic construct
  source 1..19: mol_type = other RNA
agcccctcttcagagggcc

SEQ ID NO: 1251 - RNA, 19 nt, synthetic construct
  source 1..19: mol_type = other RNA
ctttcttctttctgttgat

SEQ ID NO: 1252 - RNA, 19 nt, synthetic construct
  source 1..19: mol_type = other RNA
gcccctcttcagagggcct

SEQ ID NO: 1253 - RNA, 19 nt, synthetic construct
  source 1..19: mol_type = other RNA
tttcttctttctgttgatg

SEQ ID NO: 1254 - RNA, 19 nt, synthetic construct
  source 1..19: mol_type = other RNA
cccctcttcagagggcctg

SEQ ID NO: 1255 - RNA, 19 nt, synthetic construct
  source 1..19: mol_type = other RNA
ttcttctttctgttgatgt

SEQ ID NO: 1256 - RNA, 19 nt, synthetic construct
  source 1..19: mol_type = other RNA
ccctcttcagagggcctgt

SEQ ID NO: 1257 - RNA, 19 nt, synthetic construct
  source 1..19: mol_type = other RNA
tcttctttctgttgatgta

SEQ ID NO: 1258 - RNA, 19 nt, synthetic construct
  source 1..19: mol_type = other RNA
cctcttcagagggcctgtg

SEQ ID NO: 1259 - RNA, 19 nt, synthetic construct
  source 1..19: mol_type = other RNA
cttctttctgttgatgtaa

SEQ ID NO: 1260 - RNA, 19 nt, synthetic construct
  source 1..19: mol_type = other RNA
ctcttcagagggcctgtgg

SEQ ID NO: 1261 - RNA, 19 nt, synthetic construct
  source 1..19: mol_type = other RNA
ttctttctgttgatgtaaa

SEQ ID NO: 1262 - RNA, 19 nt, synthetic construct
  source 1..19: mol_type = other RNA
tcttcagagggcctgtggt

SEQ ID NO: 1263 - RNA, 19 nt, synthetic construct
  source 1..19: mol_type = other RNA
tctttctgttgatgtaaat

SEQ ID NO: 1264 - RNA, 19 nt, synthetic construct
  source 1..19: mol_type = other RNA
cttcagagggcctgtggtc

SEQ ID NO: 1265 - RNA, 19 nt, synthetic construct
  source 1..19: mol_type = other RNA
ctttctgttgatgtaaatg

SEQ ID NO: 1266 - RNA, 19 nt, synthetic construct
  source 1..19: mol_type = other RNA
ttcagagggcctgtggtcc

SEQ ID NO: 1267 - RNA, 19 nt, synthetic construct
  source 1..19: mol_type = other RNA
tttctgttgatgtaaatga

SEQ ID NO: 1268 - RNA, 19 nt, synthetic construct
  source 1..19: mol_type = other RNA
tcagagggcctgtggtccg

SEQ ID NO: 1269 - RNA, 19 nt, synthetic construct
  source 1..19: mol_type = other RNA
ttctgttgatgtaaatgac

SEQ ID NO: 1270 - RNA, 19 nt, synthetic construct
  source 1..19: mol_type = other RNA
cagagggcctgtggtccga

SEQ ID NO: 1271 - RNA, 19 nt, synthetic construct
  source 1..19: mol_type = other RNA
tctgttgatgtaaatgacc

SEQ ID NO: 1272 - RNA, 19 nt, synthetic construct
  source 1..19: mol_type = other RNA
agagggcctgtggtccgaa

SEQ ID NO: 1273 - RNA, 19 nt, synthetic construct
  source 1..19: mol_type = other RNA
ctgttgatgtaaatgacct

SEQ ID NO: 1274 - RNA, 19 nt, synthetic construct
  source 1..19: mol_type = other RNA
gagggcctgtggtccgaag

SEQ ID NO: 1275 - RNA, 19 nt, synthetic construct
  source 1..19: mol_type = other RNA
tgttgatgtaaatgacctc

SEQ ID NO: 1276 - RNA, 19 nt, synthetic construct
  source 1..19: mol_type = other RNA
agggcctgtggtccgaaga

SEQ ID NO: 1277 - RNA, 19 nt, synthetic construct
  source 1..19: mol_type = other RNA
gttgatgtaaatgacctcc

SEQ ID NO: 1278 - RNA, 19 nt, synthetic construct
  source 1..19: mol_type = other RNA
gggcctgtggtccgaagat

SEQ ID NO: 1279 - RNA, 19 nt, synthetic construct
  source 1..19: mol_type = other RNA
ttgatgtaaatgacctcca

SEQ ID NO: 1280 - RNA, 19 nt, synthetic construct
  source 1..19: mol_type = other RNA
ggcctgtggtccgaagatg

SEQ ID NO: 1281 - RNA, 19 nt, synthetic construct
  source 1..19: mol_type = other RNA
tgatgtaaatgacctccac

SEQ ID NO: 1282 - RNA, 19 nt, synthetic construct
  source 1..19: mol_type = other RNA
gcctgtggtccgaagatgc

SEQ ID NO: 1283 - RNA, 19 nt, synthetic construct
  source 1..19: mol_type = other RNA
gatgtaaatgacctccacc

SEQ ID NO: 1284 - RNA, 19 nt, synthetic construct
  source 1..19: mol_type = other RNA
cctgtggtccgaagatgct

SEQ ID NO: 1285 - RNA, 19 nt, synthetic construct
  source 1..19: mol_type = other RNA
atgtaaatgacctccacca

SEQ ID NO: 1286 - RNA, 19 nt, synthetic construct
  source 1..19: mol_type = other RNA
ctgtggtccgaagatgctc

SEQ ID NO: 1287 - RNA, 19 nt, synthetic construct
  source 1..19: mol_type = other RNA
tgtaaatgacctccaccat

SEQ ID NO: 1288 - RNA, 19 nt, synthetic construct
  source 1..19: mol_type = other RNA
tgtggtccgaagatgctcc

SEQ ID NO: 1289 - RNA, 19 nt, synthetic construct
  source 1..19: mol_type = other RNA
gtaaatgacctccaccata

SEQ ID NO: 1290 - RNA, 19 nt, synthetic construct
  source 1..19: mol_type = other RNA
gtggtccgaagatgctcca

SEQ ID NO: 1291 - RNA, 19 nt, synthetic construct
  source 1..19: mol_type = other RNA
taaatgacctccaccatat

SEQ ID NO: 1292 - RNA, 19 nt, synthetic construct
  source 1..19: mol_type = other RNA
tggtccgaagatgctccat

SEQ ID NO: 1293 - RNA, 19 nt, synthetic construct
  source 1..19: mol_type = other RNA
aaatgacctccaccatatc

SEQ ID NO: 1294 - RNA, 19 nt, synthetic construct
  source 1..19: mol_type = other RNA
ggtccgaagatgctccatc

SEQ ID NO: 1295 - RNA, 19 nt, synthetic construct
  source 1..19: mol_type = other RNA
aatgacctccaccatatcc

SEQ ID NO: 1296 - RNA, 19 nt, synthetic construct
  source 1..19: mol_type = other RNA
gtccgaagatgctccatct

SEQ ID NO: 1297 - RNA, 19 nt, synthetic construct
  source 1..19: mol_type = other RNA
atgacctccaccatatcca

SEQ ID NO: 1298 - RNA, 19 nt, synthetic construct
  source 1..19: mol_type = other RNA
tccgaagatgctccatctg

SEQ ID NO: 1299 - RNA, 19 nt, synthetic construct
  source 1..19: mol_type = other RNA
tgacctccaccatatccat

SEQ ID NO: 1300 - RNA, 19 nt, synthetic construct
  source 1..19: mol_type = other RNA
ccgaagatgctccatctga

SEQ ID NO: 1301 - RNA, 19 nt, synthetic construct
  source 1..19: mol_type = other RNA
gacctccaccatatccatg

SEQ ID NO: 1302 - RNA, 19 nt, synthetic construct
  source 1..19: mol_type = other RNA
cgaagatgctccatctgat

SEQ ID NO: 1303 - RNA, 19 nt, synthetic construct
  source 1..19: mol_type = other RNA
acctccaccatatccatgg

SEQ ID NO: 1304 - RNA, 19 nt, synthetic construct
  source 1..19: mol_type = other RNA
gaagatgctccatctgatc

SEQ ID NO: 1305 - RNA, 19 nt, synthetic construct
  source 1..19: mol_type = other RNA
cctccaccatatccatggc

SEQ ID NO: 1306 - RNA, 19 nt, synthetic construct
  source 1..19: mol_type = other RNA
aagatgctccatctgatca

SEQ ID NO: 1307 - RNA, 19 nt, synthetic construct
  source 1..19: mol_type = other RNA
ctccaccatatccatggct

SEQ ID NO: 1308 - RNA, 19 nt, synthetic construct
  source 1..19: mol_type = other RNA
agatgctccatctgatcaa

SEQ ID NO: 1309 - RNA, 19 nt, synthetic construct
  source 1..19: mol_type = other RNA
tccaccatatccatggctt

SEQ ID NO: 1310 - RNA, 19 nt, synthetic construct
  source 1..19: mol_type = other RNA
gatgctccatctgatcaaa

SEQ ID NO: 1311 - RNA, 19 nt, synthetic construct
  source 1..19: mol_type = other RNA
ccaccatatccatggcttc

SEQ ID NO: 1312 - RNA, 19 nt, synthetic construct
  source 1..19: mol_type = other RNA
atgctccatctgatcaaag

SEQ ID NO: 1313 - RNA, 19 nt, synthetic construct
  source 1..19: mol_type = other RNA
caccatatccatggcttcc

SEQ ID NO: 1314 - RNA, 19 nt, synthetic construct
  source 1..19: mol_type = other RNA
tgctccatctgatcaaagt

SEQ ID NO: 1315 - RNA, 19 nt, synthetic construct
  source 1..19: mol_type = other RNA
accatatccatggcttcca

SEQ ID NO: 1316 - RNA, 19 nt, synthetic construct
  source 1..19: mol_type = other RNA
gctccatctgatcaaagtg

SEQ ID NO: 1317 - RNA, 19 nt, synthetic construct
  source 1..19: mol_type = other RNA
ccatatccatggcttccaa

SEQ ID NO: 1318 - RNA, 19 nt, synthetic construct
  source 1..19: mol_type = other RNA
ctccatctgatcaaagtga

SEQ ID NO: 1319 - RNA, 19 nt, synthetic construct
  source 1..19: mol_type = other RNA
catatccatggcttccaac

SEQ ID NO: 1320 - RNA, 19 nt, synthetic construct
  source 1..19: mol_type = other RNA
tccatctgatcaaagtgac

SEQ ID NO: 1321 - RNA, 19 nt, synthetic construct
  source 1..19: mol_type = other RNA
atatccatggcttccaacg

SEQ ID NO: 1322 - RNA, 19 nt, synthetic construct
  source 1..19: mol_type = other RNA
ccatctgatcaaagtgaca

SEQ ID NO: 1323 - RNA, 19 nt, synthetic construct
  source 1..19: mol_type = other RNA
tatccatggcttccaacgg

SEQ ID NO: 1324 - RNA, 19 nt, synthetic construct
  source 1..19: mol_type = other RNA
catctgatcaaagtgacac

SEQ ID NO: 1325 - RNA, 19 nt, synthetic construct
  source 1..19: mol_type = other RNA
atccatggcttccaacggt

SEQ ID NO: 1326 - RNA, 19 nt, synthetic construct
  source 1..19: mol_type = other RNA
atctgatcaaagtgacact

SEQ ID NO: 1327 - RNA, 19 nt, synthetic construct
  source 1..19: mol_type = other RNA
tccatggcttccaacggtg

SEQ ID NO: 1328 - RNA, 19 nt, synthetic construct
  source 1..19: mol_type = other RNA
tctgatcaaagtgacactt

SEQ ID NO: 1329 - RNA, 19 nt, synthetic construct
  source 1..19: mol_type = other RNA
ccatggcttccaacggtgg

SEQ ID NO: 1330 - RNA, 19 nt, synthetic construct
  source 1..19: mol_type = other RNA
ctgatcaaagtgacacttc

SEQ ID NO: 1331 - RNA, 19 nt, synthetic construct
  source 1..19: mol_type = other RNA
catggcttccaacggtggc

SEQ ID NO: 1332 - RNA, 19 nt, synthetic construct
  source 1..19: mol_type = other RNA
tgatcaaagtgacacttct

SEQ ID NO: 1333 - RNA, 19 nt, synthetic construct
  source 1..19: mol_type = other RNA
atggcttccaacggtggca

SEQ ID NO: 1334 - RNA, 19 nt, synthetic construct
  source 1..19: mol_type = other RNA
gatcaaagtgacacttctg

SEQ ID NO: 1335 - RNA, 19 nt, synthetic construct
  source 1..19: mol_type = other RNA
tggcttccaacggtggcag

SEQ ID NO: 1336 - RNA, 19 nt, synthetic construct
  source 1..19: mol_type = other RNA
atcaaagtgacacttctga

SEQ ID NO: 1337 - RNA, 19 nt, synthetic construct
  source 1..19: mol_type = other RNA
ggcttccaacggtggcagg

SEQ ID NO: 1338 - RNA, 19 nt, synthetic construct
  source 1..19: mol_type = other RNA
tcaaagtgacacttctgag

SEQ ID NO: 1339 - RNA, 19 nt, synthetic construct
  source 1..19: mol_type = other RNA
gcttccaacggtggcaggt

SEQ ID NO: 1340 - RNA, 19 nt, synthetic construct
  source 1..19: mol_type = other RNA
caaagtgacacttctgagt

SEQ ID NO: 1341 - RNA, 19 nt, synthetic construct
  source 1..19: mol_type = other RNA
cttccaacggtggcaggtt

SEQ ID NO: 1342 - RNA, 19 nt, synthetic construct
  source 1..19: mol_type = other RNA
aaagtgacacttctgagtc

SEQ ID NO: 1343 - RNA, 19 nt, synthetic construct
  source 1..19: mol_type = other RNA
ttccaacggtggcaggtta

SEQ ID NO: 1344 - RNA, 19 nt, synthetic construct
  source 1..19: mol_type = other RNA
aagtgacacttctgagtca

SEQ ID NO: 1345 - RNA, 19 nt, synthetic construct
  source 1..19: mol_type = other RNA
tccaacggtggcaggttag

SEQ ID NO: 1346 - RNA, 19 nt, synthetic construct
  source 1..19: mol_type = other RNA
agtgacacttctgagtcag

SEQ ID NO: 1347 - RNA, 19 nt, synthetic construct
  source 1..19: mol_type = other RNA
ccaacggtggcaggttagg

SEQ ID NO: 1348 - RNA, 19 nt, synthetic construct
  source 1..19: mol_type = other RNA
gtgacacttctgagtcaga

SEQ ID NO: 1349 - RNA, 19 nt, synthetic construct
  source 1..19: mol_type = other RNA
caacggtggcaggttagga

SEQ ID NO: 1350 - RNA, 19 nt, synthetic construct
  source 1..19: mol_type = other RNA
tgacacttctgagtcagat

SEQ ID NO: 1351 - RNA, 19 nt, synthetic construct
  source 1..19: mol_type = other RNA
aacggtggcaggttaggaa

SEQ ID NO: 1352 - RNA, 19 nt, synthetic construct
  source 1..19: mol_type = other RNA
gacacttctgagtcagatg

SEQ ID NO: 1353 - RNA, 19 nt, synthetic construct
  source 1..19: mol_type = other RNA
acggtggcaggttaggaaa

SEQ ID NO: 1354 - RNA, 19 nt, synthetic construct
  source 1..19: mol_type = other RNA
acacttctgagtcagatgt

SEQ ID NO: 1355 - RNA, 19 nt, synthetic construct
  source 1..19: mol_type = other RNA
cggtggcaggttaggaaat

SEQ ID NO: 1356 - RNA, 19 nt, synthetic construct
  source 1..19: mol_type = other RNA
cacttctgagtcagatgtt

SEQ ID NO: 1357 - RNA, 19 nt, synthetic construct
  source 1..19: mol_type = other RNA
ggtggcaggttaggaaatg

SEQ ID NO: 1358 - RNA, 19 nt, synthetic construct
  source 1..19: mol_type = other RNA
acttctgagtcagatgttg

SEQ ID NO: 1359 - RNA, 19 nt, synthetic construct
  source 1..19: mol_type = other RNA
gtggcaggttaggaaatgg

SEQ ID NO: 1360 - RNA, 19 nt, synthetic construct
  source 1..19: mol_type = other RNA
cttctgagtcagatgttga

SEQ ID NO: 1361 - RNA, 19 nt, synthetic construct
  source 1..19: mol_type = other RNA
tggcaggttaggaaatggc

SEQ ID NO: 1362 - RNA, 19 nt, synthetic construct
  source 1..19: mol_type = other RNA
ttctgagtcagatgttgac

SEQ ID NO: 1363 - RNA, 19 nt, synthetic construct
  source 1..19: mol_type = other RNA
ggcaggttaggaaatggcc

SEQ ID NO: 1364 - RNA, 19 nt, synthetic construct
  source 1..19: mol_type = other RNA
tctgagtcagatgttgacc

SEQ ID NO: 1365 - RNA, 19 nt, synthetic construct
  source 1..19: mol_type = other RNA
gcaggttaggaaatggcca

SEQ ID NO: 1366 - RNA, 19 nt, synthetic construct
  source 1..19: mol_type = other RNA
ctgagtcagatgttgacct

SEQ ID NO: 1367 - RNA, 19 nt, synthetic construct
  source 1..19: mol_type = other RNA
caggttaggaaatggccag

SEQ ID NO: 1368 - RNA, 19 nt, synthetic construct
  source 1..19: mol_type = other RNA
tgagtcagatgttgacctt

SEQ ID NO: 1369 - RNA, 19 nt, synthetic construct
  source 1..19: mol_type = other RNA
aggttaggaaatggccagg

SEQ ID NO: 1370 - RNA, 19 nt, synthetic construct
  source 1..19: mol_type = other RNA
gagtcagatgttgaccttg

SEQ ID NO: 1371 - RNA, 19 nt, synthetic construct
  source 1..19: mol_type = other RNA
ggttaggaaatggccaggc

SEQ ID NO: 1372 - RNA, 19 nt, synthetic construct
  source 1..19: mol_type = other RNA
agtcagatgttgaccttgg

SEQ ID NO: 1373 - RNA, 19 nt, synthetic construct
  source 1..19: mol_type = other RNA
gttaggaaatggccaggct

SEQ ID NO: 1374 - RNA, 19 nt, synthetic construct
  source 1..19: mol_type = other RNA
gtcagatgttgaccttggg

SEQ ID NO: 1375 - RNA, 19 nt, synthetic construct
  source 1..19: mol_type = other RNA
ttaggaaatggccaggcta

SEQ ID NO: 1376 - RNA, 19 nt, synthetic construct
  source 1..19: mol_type = other RNA
tcagatgttgaccttgggg

SEQ ID NO: 1377 - RNA, 19 nt, synthetic construct
  source 1..19: mol_type = other RNA
taggaaatggccaggctaa

SEQ ID NO: 1378 - RNA, 19 nt, synthetic construct
  source 1..19: mol_type = other RNA
cagatgttgaccttgggga

SEQ ID NO: 1379 - RNA, 19 nt, synthetic construct
  source 1..19: mol_type = other RNA
aggaaatggccaggctaaa

SEQ ID NO: 1380 - RNA, 19 nt, synthetic construct
  source 1..19: mol_type = other RNA
agatgttgaccttggggat

SEQ ID NO: 1381 - RNA, 19 nt, synthetic construct
  source 1..19: mol_type = other RNA
ggaaatggccaggctaaaa

SEQ ID NO: 1382 - RNA, 19 nt, synthetic construct
  source 1..19: mol_type = other RNA
gatgttgaccttggggatg

SEQ ID NO: 1383 - RNA, 19 nt, synthetic construct
  source 1..19: mol_type = other RNA
gaaatggccaggctaaaaa

SEQ ID NO: 1384 - RNA, 19 nt, synthetic construct
  source 1..19: mol_type = other RNA
atgttgaccttggggatgg

SEQ ID NO: 1385 - RNA, 19 nt, synthetic construct
  source 1..19: mol_type = other RNA
aaatggccaggctaaaaag

SEQ ID NO: 1386 - RNA, 19 nt, synthetic construct
  source 1..19: mol_type = other RNA
tgttgaccttggggatggt

SEQ ID NO: 1387 - RNA, 19 nt, synthetic construct
  source 1..19: mol_type = other RNA
aatggccaggctaaaaagt

SEQ ID NO: 1388 - RNA, 19 nt, synthetic construct
  source 1..19: mol_type = other RNA
gttgaccttggggatggtt

SEQ ID NO: 1389 - RNA, 19 nt, synthetic construct
  source 1..19: mol_type = other RNA
atggccaggctaaaaagtt

SEQ ID NO: 1390 - RNA, 19 nt, synthetic construct
  source 1..19: mol_type = other RNA
ttgaccttggggatggtta

SEQ ID NO: 1391 - RNA, 19 nt, synthetic construct
  source 1..19: mol_type = other RNA
tggccaggctaaaaagtta

SEQ ID NO: 1392 - RNA, 19 nt, synthetic construct
  source 1..19: mol_type = other RNA
tgaccttggggatggttat

SEQ ID NO: 1393 - RNA, 19 nt, synthetic construct
  source 1..19: mol_type = other RNA
ggccaggctaaaaagttat

SEQ ID NO: 1394 - RNA, 19 nt, synthetic construct
  source 1..19: mol_type = other RNA
gaccttggggatggttata

SEQ ID NO: 1395 - RNA, 19 nt, synthetic construct
  source 1..19: mol_type = other RNA
gccaggctaaaaagttatg

SEQ ID NO: 1396 - RNA, 19 nt, synthetic construct
  source 1..19: mol_type = other RNA
accttggggatggttatat

SEQ ID NO: 1397 - RNA, 19 nt, synthetic construct
  source 1..19: mol_type = other RNA
ccaggctaaaaagttatga

SEQ ID NO: 1398 - RNA, 19 nt, synthetic construct
  source 1..19: mol_type = other RNA
ccttggggatggttatata

SEQ ID NO: 1399 - RNA, 19 nt, synthetic construct
  source 1..19: mol_type = other RNA
caggctaaaaagttatgaa

SEQ ID NO: 1400 - RNA, 19 nt, synthetic construct
  source 1..19: mol_type = other RNA
cttggggatggttatataa

SEQ ID NO: 1401 - RNA, 19 nt, synthetic construct
  source 1..19: mol_type = other RNA
aggctaaaaagttatgaaa

SEQ ID NO: 1402 - RNA, 19 nt, synthetic construct
  source 1..19: mol_type = other RNA
ttggggatggttatataat

SEQ ID NO: 1403 - RNA, 19 nt, synthetic construct
  source 1..19: mol_type = other RNA
ggctaaaaagttatgaaaa

SEQ ID NO: 1404 - RNA, 19 nt, synthetic construct
  source 1..19: mol_type = other RNA
tggggatggttatataatg

SEQ ID NO: 1405 - RNA, 19 nt, synthetic construct
  source 1..19: mol_type = other RNA
gctaaaaagttatgaaaat

SEQ ID NO: 1406 - RNA, 19 nt, synthetic construct
  source 1..19: mol_type = other RNA
ggggatggttatataatga

SEQ ID NO: 1407 - RNA, 19 nt, synthetic construct
  source 1..19: mol_type = other RNA
ctaaaaagttatgaaaatt

SEQ ID NO: 1408 - RNA, 19 nt, synthetic construct
  source 1..19: mol_type = other RNA
gggatggttatataatgag

SEQ ID NO: 1409 - RNA, 19 nt, synthetic construct
  source 1..19: mol_type = other RNA
taaaaagttatgaaaattc

SEQ ID NO: 1410 - RNA, 19 nt, synthetic construct
  source 1..19: mol_type = other RNA
ggatggttatataatgaga

SEQ ID NO: 1411 - RNA, 19 nt, synthetic construct
  source 1..19: mol_type = other RNA
aaaaagttatgaaaattca

SEQ ID NO: 1412 - RNA, 19 nt, synthetic construct
  source 1..19: mol_type = other RNA
gatggttatataatgagat

SEQ ID NO: 1413 - RNA, 19 nt, synthetic construct
  source 1..19: mol_type = other RNA
aaaagttatgaaaattcaa

SEQ ID NO: 1414 - RNA, 19 nt, synthetic construct
  source 1..19: mol_type = other RNA
atggttatataatgagatg

SEQ ID NO: 1415 - RNA, 19 nt, synthetic construct
  source 1..19: mol_type = other RNA
aaagttatgaaaattcaag

SEQ ID NO: 1416 - RNA, 19 nt, synthetic construct
  source 1..19: mol_type = other RNA
tggttatataatgagatga

SEQ ID NO: 1417 - RNA, 19 nt, synthetic construct
  source 1..19: mol_type = other RNA
aagttatgaaaattcaaga

SEQ ID NO: 1418 - RNA, 19 nt, synthetic construct
  source 1..19: mol_type = other RNA
ggttatataatgagatgac

SEQ ID NO: 1419 - RNA, 19 nt, synthetic construct
  source 1..19: mol_type = other RNA
agttatgaaaattcaagac

SEQ ID NO: 1420 - RNA, 19 nt, synthetic construct
  source 1..19: mol_type = other RNA
gttatataatgagatgact

SEQ ID NO: 1421 - RNA, 19 nt, synthetic construct
  source 1..19: mol_type = other RNA
gttatgaaaattcaagact

SEQ ID NO: 1422 - RNA, 19 nt, synthetic construct
  source 1..19: mol_type = other RNA
ttatataatgagatgactc

SEQ ID NO: 1423 - RNA, 19 nt, synthetic construct
  source 1..19: mol_type = other RNA
ttatgaaaattcaagactt

SEQ ID NO: 1424 - RNA, 19 nt, synthetic construct
  source 1..19: mol_type = other RNA
tatataatgagatgactcc

SEQ ID NO: 1425 - RNA, 19 nt, synthetic construct
  source 1..19: mol_type = other RNA
tatgaaaattcaagacttt

SEQ ID NO: 1426 - RNA, 19 nt, synthetic construct
  source 1..19: mol_type = other RNA
atataatgagatgactcca

SEQ ID NO: 1427 - RNA, 19 nt, synthetic construct
  source 1..19: mol_type = other RNA
atgaaaattcaagactttg

SEQ ID NO: 1428 - RNA, 19 nt, synthetic construct
  source 1..19: mol_type = other RNA
tataatgagatgactccaa

SEQ ID NO: 1429 - RNA, 19 nt, synthetic construct
  source 1..19: mol_type = other RNA
tgaaaattcaagactttgg

SEQ ID NO: 1430 - RNA, 19 nt, synthetic construct
  source 1..19: mol_type = other RNA
ataatgagatgactccaaa

SEQ ID NO: 1431 - RNA, 19 nt, synthetic construct
  source 1..19: mol_type = other RNA
gaaaattcaagactttggg

SEQ ID NO: 1432 - RNA, 19 nt, synthetic construct
  source 1..19: mol_type = other RNA
taatgagatgactccaaaa

SEQ ID NO: 1433 - RNA, 19 nt, synthetic construct
  source 1..19: mol_type = other RNA
aaaattcaagactttgggg

SEQ ID NO: 1434 - RNA, 19 nt, synthetic construct
  source 1..19: mol_type = other RNA
aatgagatgactccaaaac

SEQ ID NO: 1435 - RNA, 19 nt, synthetic construct
  source 1..19: mol_type = other RNA
aaattcaagactttgggga

SEQ ID NO: 1436 - RNA, 19 nt, synthetic construct
  source 1..19: mol_type = other RNA
atgagatgactccaaaact

SEQ ID NO: 1437 - RNA, 19 nt, synthetic construct
  source 1..19: mol_type = other RNA
aattcaagactttggggag

SEQ ID NO: 1438 - RNA, 19 nt, synthetic construct
  source 1..19: mol_type = other RNA
ctccccaaagtcttgaggc

SEQ ID NO: 1439 - RNA, 19 nt, synthetic construct
  source 1..19: mol_type = other RNA
tctacataataaaacttaa

SEQ ID NO: 1440 - RNA, 19 nt, synthetic construct
  source 1..19: mol_type = other RNA
tccccaaagtcttgaggca

SEQ ID NO: 1441 - RNA, 19 nt, synthetic construct
  source 1..19: mol_type = other RNA
ctacataataaaacttaat

SEQ ID NO: 1442 - RNA, 19 nt, synthetic construct
  source 1..19: mol_type = other RNA
ccccaaagtcttgaggcaa

SEQ ID NO: 1443 - RNA, 19 nt, synthetic construct
  source 1..19: mol_type = other RNA
tacataataaaacttaatc

SEQ ID NO: 1444 - RNA, 19 nt, synthetic construct
  source 1..19: mol_type = other RNA
cccaaagtcttgaggcaag

SEQ ID NO: 1445 - RNA, 19 nt, synthetic construct
  source 1..19: mol_type = other RNA
acataataaaacttaatca

SEQ ID NO: 1446 - RNA, 19 nt, synthetic construct
  source 1..19: mol_type = other RNA
ccaaagtcttgaggcaagg

SEQ ID NO: 1447 - RNA, 19 nt, synthetic construct
  source 1..19: mol_type = other RNA
cataataaaacttaatcac

SEQ ID NO: 1448 - RNA, 19 nt, synthetic construct
  source 1..19: mol_type = other RNA
caaagtcttgaggcaaggt

SEQ ID NO: 1449 - RNA, 19 nt, synthetic construct
  source 1..19: mol_type = other RNA
ataataaaacttaatcact

SEQ ID NO: 1450 - RNA, 19 nt, synthetic construct
  source 1..19: mol_type = other RNA
aaagtcttgaggcaaggtc

SEQ ID NO: 1451 - RNA, 19 nt, synthetic construct
  source 1..19: mol_type = other RNA
taataaaacttaatcactg

SEQ ID NO: 1452 - RNA, 19 nt, synthetic construct
  source 1..19: mol_type = other RNA
aagtcttgaggcaaggtct

SEQ ID NO: 1453 - RNA, 19 nt, synthetic construct
  source 1..19: mol_type = other RNA
aataaaacttaatcactgg

SEQ ID NO: 1454 - RNA, 19 nt, synthetic construct
  source 1..19: mol_type = other RNA
agtcttgaggcaaggtctc

SEQ ID NO: 1455 - RNA, 19 nt, synthetic construct
  source 1..19: mol_type = other RNA
ataaaacttaatcactggg

SEQ ID NO: 1456 - RNA, 19 nt, synthetic construct
  source 1..19: mol_type = other RNA
gtcttgaggcaaggtctcg

SEQ ID NO: 1457 - RNA, 19 nt, synthetic construct
  source 1..19: mol_type = other RNA
taaaacttaatcactgggg

SEQ ID NO: 1458 - RNA, 19 nt, synthetic construct
  source 1..19: mol_type = other RNA
tcttgaggcaaggtctcgc

SEQ ID NO: 1459 - RNA, 19 nt, synthetic construct
  source 1..19: mol_type = other RNA
aaaacttaatcactggggc

SEQ ID NO: 1460 - RNA, 19 nt, synthetic construct
  source 1..19: mol_type = other RNA
cttgaggcaaggtctcgct

SEQ ID NO: 1461 - RNA, 19 nt, synthetic construct
  source 1..19: mol_type = other RNA
aaacttaatcactggggca

SEQ ID NO: 1462 - RNA, 19 nt, synthetic construct
  source 1..19: mol_type = other RNA
ttgaggcaaggtctcgcta

SEQ ID NO: 1463 - RNA, 19 nt, synthetic construct
  source 1..19: mol_type = other RNA
aacttaatcactggggcac

SEQ ID NO: 1464 - RNA, 19 nt, synthetic construct
  source 1..19: mol_type = other RNA
tgaggcaaggtctcgctaa

SEQ ID NO: 1465 - RNA, 19 nt, synthetic construct
  source 1..19: mol_type = other RNA
acttaatcactggggcaca

SEQ ID NO: 1466 - RNA, 19 nt, synthetic construct
  source 1..19: mol_type = other RNA
gaggcaaggtctcgctaag

SEQ ID NO: 1467 - RNA, 19 nt, synthetic construct
  source 1..19: mol_type = other RNA
cttaatcactggggcacag

SEQ ID NO: 1468 - RNA, 19 nt, synthetic construct
  source 1..19: mol_type = other RNA
aggcaaggtctcgctaagg

SEQ ID NO: 1469 - RNA, 19 nt, synthetic construct
  source 1..19: mol_type = other RNA
ttaatcactggggcacagg

SEQ ID NO: 1470 - RNA, 19 nt, synthetic construct
  source 1..19: mol_type = other RNA
ggcaaggtctcgctaaggg

SEQ ID NO: 1471 - RNA, 19 nt, synthetic construct
  source 1..19: mol_type = other RNA
taatcactggggcacaggg

SEQ ID NO: 1472 - RNA, 19 nt, synthetic construct
  source 1..19: mol_type = other RNA
gcaaggtctcgctaagggc

SEQ ID NO: 1473 - RNA, 19 nt, synthetic construct
  source 1..19: mol_type = other RNA
aatcactggggcacaggga

SEQ ID NO: 1474 - RNA, 19 nt, synthetic construct
  source 1..19: mol_type = other RNA
caaggtctcgctaagggct

SEQ ID NO: 1475 - RNA, 19 nt, synthetic construct
  source 1..19: mol_type = other RNA
atcactggggcacagggat

SEQ ID NO: 1476 - RNA, 19 nt, synthetic construct
  source 1..19: mol_type = other RNA
aaggtctcgctaagggctg

SEQ ID NO: 1477 - RNA, 19 nt, synthetic construct
  source 1..19: mol_type = other RNA
tcactggggcacagggatg

SEQ ID NO: 1478 - RNA, 19 nt, synthetic construct
  source 1..19: mol_type = other RNA
aggtctcgctaagggctgg

SEQ ID NO: 1479 - RNA, 19 nt, synthetic construct
  source 1..19: mol_type = other RNA
cactggggcacagggatgc

SEQ ID NO: 1480 - RNA, 19 nt, synthetic construct
  source 1..19: mol_type = other RNA
ggtctcgctaagggctgga

SEQ ID NO: 1481 - RNA, 19 nt, synthetic construct
  source 1..19: mol_type = other RNA
actggggcacagggatgca

SEQ ID NO: 1482 - RNA, 19 nt, synthetic construct
  source 1..19: mol_type = other RNA
gtctcgctaagggctggaa

SEQ ID NO: 1483 - RNA, 19 nt, synthetic construct
  source 1..19: mol_type = other RNA
ctggggcacagggatgcac

SEQ ID NO: 1484 - RNA, 19 nt, synthetic construct
  source 1..19: mol_type = other RNA
tctcgctaagggctggaat

SEQ ID NO: 1485 - RNA, 19 nt, synthetic construct
  source 1..19: mol_type = other RNA
tggggcacagggatgcacg

SEQ ID NO: 1486 - RNA, 19 nt, synthetic construct
  source 1..19: mol_type = other RNA
ctcgctaagggctggaatg

SEQ ID NO: 1487 - RNA, 19 nt, synthetic construct
  source 1..19: mol_type = other RNA
ggggcacagggatgcacgc

SEQ ID NO: 1488 - RNA, 19 nt, synthetic construct
  source 1..19: mol_type = other RNA
tcgctaagggctggaatgc

SEQ ID NO: 1489 - RNA, 19 nt, synthetic construct
  source 1..19: mol_type = other RNA
gggcacagggatgcacgct

SEQ ID NO: 1490 - RNA, 19 nt, synthetic construct
  source 1..19: mol_type = other RNA
cgctaagggctggaatgca

SEQ ID NO: 1491 - RNA, 19 nt, synthetic construct
  source 1..19: mol_type = other RNA
ggcacagggatgcacgctt

SEQ ID NO: 1492 - RNA, 19 nt, synthetic construct
  source 1..19: mol_type = other RNA
gctaagggctggaatgcag

SEQ ID NO: 1493 - RNA, 19 nt, synthetic construct
  source 1..19: mol_type = other RNA
gcacagggatgcacgcttg

SEQ ID NO: 1494 - RNA, 19 nt, synthetic construct
  source 1..19: mol_type = other RNA
ctaagggctggaatgcagt

SEQ ID NO: 1495 - RNA, 19 nt, synthetic construct
  source 1..19: mol_type = other RNA
cacagggatgcacgcttgt

SEQ ID NO: 1496 - RNA, 19 nt, synthetic construct
  source 1..19: mol_type = other RNA
taagggctggaatgcagtg

SEQ ID NO: 1497 - RNA, 19 nt, synthetic construct
  source 1..19: mol_type = other RNA
acagggatgcacgcttgta

SEQ ID NO: 1498 - RNA, 19 nt, synthetic construct
  source 1..19: mol_type = other RNA
aagggctggaatgcagtgg

SEQ ID NO: 1499 - RNA, 19 nt, synthetic construct
  source 1..19: mol_type = other RNA
cagggatgcacgcttgtaa

SEQ ID NO: 1500 - RNA, 19 nt, synthetic construct
  source 1..19: mol_type = other RNA
agggctggaatgcagtggc

SEQ ID NO: 1501 - RNA, 19 nt, synthetic construct
  source 1..19: mol_type = other RNA
agggatgcacgcttgtaat

SEQ ID NO: 1502 - RNA, 19 nt, synthetic construct
  source 1..19: mol_type = other RNA
gggctggaatgcagtggct

SEQ ID NO: 1503 - RNA, 19 nt, synthetic construct
  source 1..19: mol_type = other RNA
gggatgcacgcttgtaatc

SEQ ID NO: 1504 - RNA, 19 nt, synthetic construct
  source 1..19: mol_type = other RNA
ggctggaatgcagtggcta

SEQ ID NO: 1505 - RNA, 19 nt, synthetic construct
  source 1..19: mol_type = other RNA
ggatgcacgcttgtaatcc

SEQ ID NO: 1506 - RNA, 19 nt, synthetic construct
  source 1..19: mol_type = other RNA
gctggaatgcagtggctat

SEQ ID NO: 1507 - RNA, 19 nt, synthetic construct
  source 1..19: mol_type = other RNA
gatgcacgcttgtaatccc

SEQ ID NO: 1508 - RNA, 19 nt, synthetic construct
  source 1..19: mol_type = other RNA
ctggaatgcagtggctatt

SEQ ID NO: 1509 - RNA, 19 nt, synthetic construct
  source 1..19: mol_type = other RNA
atgcacgcttgtaatccca

SEQ ID NO: 1510 - RNA, 19 nt, synthetic construct
  source 1..19: mol_type = other RNA
tggaatgcagtggctattc

SEQ ID NO: 1511 - RNA, 19 nt, synthetic construct
  source 1..19: mol_type = other RNA
tgcacgcttgtaatcccag

SEQ ID NO: 1512 - RNA, 19 nt, synthetic construct
  source 1..19: mol_type = other RNA
ggaatgcagtggctattca

SEQ ID NO: 1513 - RNA, 19 nt, synthetic construct
  source 1..19: mol_type = other RNA
gcacgcttgtaatcccagc

SEQ ID NO: 1514 - RNA, 19 nt, synthetic construct
  source 1..19: mol_type = other RNA
gaatgcagtggctattcac

SEQ ID NO: 1515 - RNA, 19 nt, synthetic construct
  source 1..19: mol_type = other RNA
cacgcttgtaatcccagct

SEQ ID NO: 1516 - RNA, 19 nt, synthetic construct
  source 1..19: mol_type = other RNA
aatgcagtggctattcaca

SEQ ID NO: 1517 - RNA, 19 nt, synthetic construct
  source 1..19: mol_type = other RNA
acgcttgtaatcccagcta

SEQ ID NO: 1518 - RNA, 19 nt, synthetic construct
  source 1..19: mol_type = other RNA
atgcagtggctattcacag

SEQ ID NO: 1519 - RNA, 19 nt, synthetic construct
  source 1..19: mol_type = other RNA
cgcttgtaatcccagctac

SEQ ID NO: 1520 - RNA, 19 nt, synthetic construct
  source 1..19: mol_type = other RNA
tgcagtggctattcacagg

SEQ ID NO: 1521 - RNA, 19 nt, synthetic construct
  source 1..19: mol_type = other RNA
gcttgtaatcccagctact

SEQ ID NO: 1522 - RNA, 19 nt, synthetic construct
  source 1..19: mol_type = other RNA
gcagtggctattcacaggt

SEQ ID NO: 1523 - RNA, 19 nt, synthetic construct
  source 1..19: mol_type = other RNA
cttgtaatcccagctactg

SEQ ID NO: 1524 - RNA, 19 nt, synthetic construct
  source 1..19: mol_type = other RNA
cagtggctattcacaggtg

SEQ ID NO: 1525 - RNA, 19 nt, synthetic construct
  source 1..19: mol_type = other RNA
ttgtaatcccagctactgg

SEQ ID NO: 1526 - RNA, 19 nt, synthetic construct
  source 1..19: mol_type = other RNA
agtggctattcacaggtgc

SEQ ID NO: 1527 - RNA, 19 nt, synthetic construct
  source 1..19: mol_type = other RNA
tgtaatcccagctactggg

SEQ ID NO: 1528 - RNA, 19 nt, synthetic construct
  source 1..19: mol_type = other RNA
gtggctattcacaggtgca

SEQ ID NO: 1529 - RNA, 19 nt, synthetic construct
  source 1..19: mol_type = other RNA
gtaatcccagctactgggg

SEQ ID NO: 1530 - RNA, 19 nt, synthetic construct
  source 1..19: mol_type = other RNA
tggctattcacaggtgcag

SEQ ID NO: 1531 - RNA, 19 nt, synthetic construct
  source 1..19: mol_type = other RNA
taatcccagctactgggga

SEQ ID NO: 1532 - RNA, 19 nt, synthetic construct
  source 1..19: mol_type = other RNA
ggctattcacaggtgcagt

SEQ ID NO: 1533 - RNA, 19 nt, synthetic construct
  source 1..19: mol_type = other RNA
aatcccagctactggggaa

SEQ ID NO: 1534 - RNA, 19 nt, synthetic construct
  source 1..19: mol_type = other RNA
gctattcacaggtgcagtc

SEQ ID NO: 1535 - RNA, 19 nt, synthetic construct
  source 1..19: mol_type = other RNA
atcccagctactggggaag

SEQ ID NO: 1536 - RNA, 19 nt, synthetic construct
  source 1..19: mol_type = other RNA
ctattcacaggtgcagtca

SEQ ID NO: 1537 - RNA, 19 nt, synthetic construct
  source 1..19: mol_type = other RNA
tcccagctactggggaagc

SEQ ID NO: 1538 - RNA, 19 nt, synthetic construct
  source 1..19: mol_type = other RNA
tattcacaggtgcagtcat

SEQ ID NO: 1539 - RNA, 19 nt, synthetic construct
  source 1..19: mol_type = other RNA
cccagctactggggaagct

SEQ ID NO: 1540 - RNA, 19 nt, synthetic construct
  source 1..19: mol_type = other RNA
attcacaggtgcagtcata

SEQ ID NO: 1541 - RNA, 19 nt, synthetic construct
  source 1..19: mol_type = other RNA
ccagctactggggaagctt

SEQ ID NO: 1542 - RNA, 19 nt, synthetic construct
  source 1..19: mol_type = other RNA
ttcacaggtgcagtcataa

SEQ ID NO: 1543 - RNA, 19 nt, synthetic construct
  source 1..19: mol_type = other RNA
cagctactggggaagctta

SEQ ID NO: 1544 - RNA, 19 nt, synthetic construct
  source 1..19: mol_type = other RNA
tcacaggtgcagtcataat

SEQ ID NO: 1545 - RNA, 19 nt, synthetic construct
  source 1..19: mol_type = other RNA
agctactggggaagcttag

SEQ ID NO: 1546 - RNA, 19 nt, synthetic construct
  source 1..19: mol_type = other RNA
cacaggtgcagtcataatg

SEQ ID NO: 1547 - RNA, 19 nt, synthetic construct
  source 1..19: mol_type = other RNA
gctactggggaagcttagg

SEQ ID NO: 1548 - RNA, 19 nt, synthetic construct
  source 1..19: mol_type = other RNA
acaggtgcagtcataatgc

SEQ ID NO: 1549 - RNA, 19 nt, synthetic construct
  source 1..19: mol_type = other RNA
ctactggggaagcttaggc

SEQ ID NO: 1550 - RNA, 19 nt, synthetic construct
  source 1..19: mol_type = other RNA
caggtgcagtcataatgca

SEQ ID NO: 1551 - RNA, 19 nt, synthetic construct
  source 1..19: mol_type = other RNA
tactggggaagcttaggca

SEQ ID NO: 1552 - RNA, 19 nt, synthetic construct
  source 1..19: mol_type = other RNA
aggtgcagtcataatgcac

SEQ ID NO: 1553 - RNA, 19 nt, synthetic construct
  source 1..19: mol_type = other RNA
actggggaagcttaggcag

SEQ ID NO: 1554 - RNA, 19 nt, synthetic construct
  source 1..19: mol_type = other RNA
ggtgcagtcataatgcact

SEQ ID NO: 1555 - RNA, 19 nt, synthetic construct
  source 1..19: mol_type = other RNA
ctggggaagcttaggcagg

SEQ ID NO: 1556 - RNA, 19 nt, synthetic construct
  source 1..19: mol_type = other RNA
gtgcagtcataatgcacta

SEQ ID NO: 1557 - RNA, 19 nt, synthetic construct
  source 1..19: mol_type = other RNA
tggggaagcttaggcagga

SEQ ID NO: 1558 - RNA, 19 nt, synthetic construct
  source 1..19: mol_type = other RNA
tgcagtcataatgcactac

SEQ ID NO: 1559 - RNA, 19 nt, synthetic construct
  source 1..19: mol_type = other RNA
ggggaagcttaggcaggac

SEQ ID NO: 1560 - RNA, 19 nt, synthetic construct
  source 1..19: mol_type = other RNA
gcagtcataatgcactaca

SEQ ID NO: 1561 - RNA, 19 nt, synthetic construct
  source 1..19: mol_type = other RNA
gggaagcttaggcaggacg

SEQ ID NO: 1562 - RNA, 19 nt, synthetic construct
  source 1..19: mol_type = other RNA
cagtcataatgcactacag

SEQ ID NO: 1563 - RNA, 19 nt, synthetic construct
  source 1..19: mol_type = other RNA
ggaagcttaggcaggacga

SEQ ID NO: 1564 - RNA, 19 nt, synthetic construct
  source 1..19: mol_type = other RNA
agtcataatgcactacagt

SEQ ID NO: 1565 - RNA, 19 nt, synthetic construct
  source 1..19: mol_type = other RNA
gaagcttaggcaggacgac

SEQ ID NO: 1566 - RNA, 19 nt, synthetic construct
  source 1..19: mol_type = other RNA
gtcataatgcactacagtc

SEQ ID NO: 1567 - RNA, 19 nt, synthetic construct
  source 1..19: mol_type = other RNA
aagcttaggcaggacgact

SEQ ID NO: 1568 - RNA, 19 nt, synthetic construct
  source 1..19: mol_type = other RNA
tcataatgcactacagtct

SEQ ID NO: 1569 - RNA, 19 nt, synthetic construct
  source 1..19: mol_type = other RNA
agcttaggcaggacgactg

SEQ ID NO: 1570 - RNA, 19 nt, synthetic construct
  source 1..19: mol_type = other RNA
cataatgcactacagtctg

SEQ ID NO: 1571 - RNA, 19 nt, synthetic construct
  source 1..19: mol_type = other RNA
gcttaggcaggacgactgt

SEQ ID NO: 1572 - RNA, 19 nt, synthetic construct
  source 1..19: mol_type = other RNA
ataatgcactacagtctga

SEQ ID NO: 1573 - RNA, 19 nt, synthetic construct
  source 1..19: mol_type = other RNA
cttaggcaggacgactgtt

SEQ ID NO: 1574 - RNA, 19 nt, synthetic construct
  source 1..19: mol_type = other RNA
taatgcactacagtctgaa

SEQ ID NO: 1575 - RNA, 19 nt, synthetic construct
  source 1..19: mol_type = other RNA
ttaggcaggacgactgttt

SEQ ID NO: 1576 - RNA, 19 nt, synthetic construct
  source 1..19: mol_type = other RNA
aatgcactacagtctgaaa

SEQ ID NO: 1577 - RNA, 19 nt, synthetic construct
  source 1..19: mol_type = other RNA
taggcaggacgactgtttg

SEQ ID NO: 1578 - RNA, 19 nt, synthetic construct
  source 1..19: mol_type = other RNA
atgcactacagtctgaaac

SEQ ID NO: 1579 - RNA, 19 nt, synthetic construct
  source 1..19: mol_type = other RNA
aggcaggacgactgtttga

SEQ ID NO: 1580 - RNA, 19 nt, synthetic construct
  source 1..19: mol_type = other RNA
tgcactacagtctgaaact

SEQ ID NO: 1581 - RNA, 19 nt, synthetic construct
  source 1..19: mol_type = other RNA
ggcaggacgactgtttgag

SEQ ID NO: 1582 - RNA, 19 nt, synthetic construct
  source 1..19: mol_type = other RNA
gcactacagtctgaaactc

SEQ ID NO: 1583 - RNA, 19 nt, synthetic construct
  source 1..19: mol_type = other RNA
gcaggacgactgtttgagc

SEQ ID NO: 1584 - RNA, 19 nt, synthetic construct
  source 1..19: mol_type = other RNA
cactacagtctgaaactcc

SEQ ID NO: 1585 - RNA, 19 nt, synthetic construct
  source 1..19: mol_type = other RNA
caggacgactgtttgagct

SEQ ID NO: 1586 - RNA, 19 nt, synthetic construct
  source 1..19: mol_type = other RNA
actacagtctgaaactcct

SEQ ID NO: 1587 - RNA, 19 nt, synthetic construct
  source 1..19: mol_type = other RNA
aggacgactgtttgagctc

SEQ ID NO: 1588 - RNA, 19 nt, synthetic construct
  source 1..19: mol_type = other RNA
ctacagtctgaaactcctg

SEQ ID NO: 1589 - RNA, 19 nt, synthetic construct
  source 1..19: mol_type = other RNA
ggacgactgtttgagctca

SEQ ID NO: 1590 - RNA, 19 nt, synthetic construct
  source 1..19: mol_type = other RNA
tacagtctgaaactcctga

SEQ ID NO: 1591 - RNA, 19 nt, synthetic construct
  source 1..19: mol_type = other RNA
gacgactgtttgagctcag

SEQ ID NO: 1592 - RNA, 19 nt, synthetic construct
  source 1..19: mol_type = other RNA
acagtctgaaactcctgag

SEQ ID NO: 1593 - RNA, 19 nt, synthetic construct
  source 1..19: mol_type = other RNA
acgactgtttgagctcagg

SEQ ID NO: 1594 - RNA, 19 nt, synthetic construct
  source 1..19: mol_type = other RNA
cagtctgaaactcctgagc

SEQ ID NO: 1595 - RNA, 19 nt, synthetic construct
  source 1..19: mol_type = other RNA
cgactgtttgagctcagga

SEQ ID NO: 1596 - RNA, 19 nt, synthetic construct
  source 1..19: mol_type = other RNA
agtctgaaactcctgagct

SEQ ID NO: 1597 - RNA, 19 nt, synthetic construct
  source 1..19: mol_type = other RNA
gactgtttgagctcaggag

SEQ ID NO: 1598 - RNA, 19 nt, synthetic construct
  source 1..19: mol_type = other RNA
gtctgaaactcctgagctc

SEQ ID NO: 1599 - RNA, 19 nt, synthetic construct
  source 1..19: mol_type = other RNA
actgtttgagctcaggagt

SEQ ID NO: 1600 - RNA, 19 nt, synthetic construct
  source 1..19: mol_type = other RNA
tctgaaactcctgagctca

SEQ ID NO: 1601 - RNA, 19 nt, synthetic construct
  source 1..19: mol_type = other RNA
ctgtttgagctcaggagtt

SEQ ID NO: 1602 - RNA, 19 nt, synthetic construct
  source 1..19: mol_type = other RNA
ctgaaactcctgagctcaa

SEQ ID NO: 1603 - RNA, 19 nt, synthetic construct
  source 1..19: mol_type = other RNA
tgtttgagctcaggagttt

SEQ ID NO: 1604 - RNA, 19 nt, synthetic construct
  source 1..19: mol_type = other RNA
tgaaactcctgagctcaaa

SEQ ID NO: 1605 - RNA, 19 nt, synthetic construct
  source 1..19: mol_type = other RNA
gtttgagctcaggagtttc

SEQ ID NO: 1606 - RNA, 19 nt, synthetic construct
  source 1..19: mol_type = other RNA
gaaactcctgagctcaaac

SEQ ID NO: 1607 - RNA, 19 nt, synthetic construct
  source 1..19: mol_type = other RNA
tttgagctcaggagtttca

SEQ ID NO: 1608 - RNA, 19 nt, synthetic construct
  source 1..19: mol_type = other RNA
aaactcctgagctcaaaca

SEQ ID NO: 1609 - RNA, 19 nt, synthetic construct
  source 1..19: mol_type = other RNA
ttgagctcaggagtttcag

SEQ ID NO: 1610 - RNA, 19 nt, synthetic construct
  source 1..19: mol_type = other RNA
aactcctgagctcaaacag

SEQ ID NO: 1611 - RNA, 19 nt, synthetic construct
  source 1..19: mol_type = other RNA
tgagctcaggagtttcaga

SEQ ID NO: 1612 - RNA, 19 nt, synthetic construct
  source 1..19: mol_type = other RNA
actcctgagctcaaacagt

SEQ ID NO: 1613 - RNA, 19 nt, synthetic construct
  source 1..19: mol_type = other RNA
gagctcaggagtttcagac

SEQ ID NO: 1614 - RNA, 19 nt, synthetic construct
  source 1..19: mol_type = other RNA
ctcctgagctcaaacagtc

SEQ ID NO: 1615 - RNA, 19 nt, synthetic construct
  source 1..19: mol_type = other RNA
agctcaggagtttcagact

SEQ ID NO: 1616 - RNA, 19 nt, synthetic construct
  source 1..19: mol_type = other RNA
tcctgagctcaaacagtcg

SEQ ID NO: 1617 - RNA, 19 nt, synthetic construct
  source 1..19: mol_type = other RNA
gctcaggagtttcagactg

SEQ ID NO: 1618 - RNA, 19 nt, synthetic construct
  source 1..19: mol_type = other RNA
cctgagctcaaacagtcgt

SEQ ID NO: 1619 - RNA, 19 nt, synthetic construct
  source 1..19: mol_type = other RNA
ctcaggagtttcagactgt

SEQ ID NO: 1620 - RNA, 19 nt, synthetic construct
  source 1..19: mol_type = other RNA
ctgagctcaaacagtcgtc

SEQ ID NO: 1621 - RNA, 19 nt, synthetic construct
  source 1..19: mol_type = other RNA
tcaggagtttcagactgta

SEQ ID NO: 1622 - RNA, 19 nt, synthetic construct
  source 1..19: mol_type = other RNA
tgagctcaaacagtcgtcc

SEQ ID NO: 1623 - RNA, 19 nt, synthetic construct
  source 1..19: mol_type = other RNA
caggagtttcagactgtag

SEQ ID NO: 1624 - RNA, 19 nt, synthetic construct
  source 1..19: mol_type = other RNA
gagctcaaacagtcgtcct

SEQ ID NO: 1625 - RNA, 19 nt, synthetic construct
  source 1..19: mol_type = other RNA
aggagtttcagactgtagt

SEQ ID NO: 1626 - RNA, 19 nt, synthetic construct
  source 1..19: mol_type = other RNA
agctcaaacagtcgtcctg

SEQ ID NO: 1627 - RNA, 19 nt, synthetic construct
  source 1..19: mol_type = other RNA
ggagtttcagactgtagtg

SEQ ID NO: 1628 - RNA, 19 nt, synthetic construct
  source 1..19: mol_type = other RNA
gctcaaacagtcgtcctgc

SEQ ID NO: 1629 - RNA, 19 nt, synthetic construct
  source 1..19: mol_type = other RNA
gagtttcagactgtagtgc

SEQ ID NO: 1630 - RNA, 19 nt, synthetic construct
  source 1..19: mol_type = other RNA
ctcaaacagtcgtcctgcc

SEQ ID NO: 1631 - RNA, 19 nt, synthetic construct
  source 1..19: mol_type = other RNA
agtttcagactgtagtgca

SEQ ID NO: 1632 - RNA, 19 nt, synthetic construct
  source 1..19: mol_type = other RNA
tcaaacagtcgtcctgcct

SEQ ID NO: 1633 - RNA, 19 nt, synthetic construct
  source 1..19: mol_type = other RNA
gtttcagactgtagtgcat

SEQ ID NO: 1634 - RNA, 19 nt, synthetic construct
  source 1..19: mol_type = other RNA
caaacagtcgtcctgccta

SEQ ID NO: 1635 - RNA, 19 nt, synthetic construct
  source 1..19: mol_type = other RNA
tttcagactgtagtgcatt

SEQ ID NO: 1636 - RNA, 19 nt, synthetic construct
  source 1..19: mol_type = other RNA
aaacagtcgtcctgcctaa

SEQ ID NO: 1637 - RNA, 19 nt, synthetic construct
  source 1..19: mol_type = other RNA
ttcagactgtagtgcatta

SEQ ID NO: 1638 - RNA, 19 nt, synthetic construct
  source 1..19: mol_type = other RNA
aacagtcgtcctgcctaag

SEQ ID NO: 1639 - RNA, 19 nt, synthetic construct
  source 1..19: mol_type = other RNA
tcagactgtagtgcattat

SEQ ID NO: 1640 - RNA, 19 nt, synthetic construct
  source 1..19: mol_type = other RNA
acagtcgtcctgcctaagc

SEQ ID NO: 1641 - RNA, 19 nt, synthetic construct
  source 1..19: mol_type = other RNA
cagactgtagtgcattatg

SEQ ID NO: 1642 - RNA, 19 nt, synthetic construct
  source 1..19: mol_type = other RNA
cagtcgtcctgcctaagct

SEQ ID NO: 1643 - RNA, 19 nt, synthetic construct
  source 1..19: mol_type = other RNA
agactgtagtgcattatga

SEQ ID NO: 1644 - RNA, 19 nt, synthetic construct
  source 1..19: mol_type = other RNA
agtcgtcctgcctaagctt

SEQ ID NO: 1645 - RNA, 19 nt, synthetic construct
  source 1..19: mol_type = other RNA
gactgtagtgcattatgac

SEQ ID NO: 1646 - RNA, 19 nt, synthetic construct
  source 1..19: mol_type = other RNA
gtcgtcctgcctaagcttc

SEQ ID NO: 1647 - RNA, 19 nt, synthetic construct
  source 1..19: mol_type = other RNA
actgtagtgcattatgact

SEQ ID NO: 1648 - RNA, 19 nt, synthetic construct
  source 1..19: mol_type = other RNA
tcgtcctgcctaagcttcc

SEQ ID NO: 1649 - RNA, 19 nt, synthetic construct
  source 1..19: mol_type = other RNA
ctgtagtgcattatgactg

SEQ ID NO: 1650 - RNA, 19 nt, synthetic construct
  source 1..19: mol_type = other RNA
cgtcctgcctaagcttccc

SEQ ID NO: 1651 - RNA, 19 nt, synthetic construct
  source 1..19: mol_type = other RNA
tgtagtgcattatgactgc

SEQ ID NO: 1652 - RNA, 19 nt, synthetic construct
  source 1..19: mol_type = other RNA
gtcctgcctaagcttcccc

SEQ ID NO: 1653 - RNA, 19 nt, synthetic construct
  source 1..19: mol_type = other RNA
gtagtgcattatgactgca

SEQ ID NO: 1654 - RNA, 19 nt, synthetic construct
  source 1..19: mol_type = other RNA
tcctgcctaagcttcccca

SEQ ID NO: 1655 - RNA, 19 nt, synthetic construct
  source 1..19: mol_type = other RNA
tagtgcattatgactgcac

SEQ ID NO: 1656 - RNA, 19 nt, synthetic construct
  source 1..19: mol_type = other RNA
cctgcctaagcttccccag

SEQ ID NO: 1657 - RNA, 19 nt, synthetic construct
  source 1..19: mol_type = other RNA
agtgcattatgactgcacc

SEQ ID NO: 1658 - RNA, 19 nt, synthetic construct
  source 1..19: mol_type = other RNA
ctgcctaagcttccccagt

SEQ ID NO: 1659 - RNA, 19 nt, synthetic construct
  source 1..19: mol_type = other RNA
gtgcattatgactgcacct

SEQ ID NO: 1660 - RNA, 19 nt, synthetic construct
  source 1..19: mol_type = other RNA
tgcctaagcttccccagta

SEQ ID NO: 1661 - RNA, 19 nt, synthetic construct
  source 1..19: mol_type = other RNA
tgcattatgactgcacctg

SEQ ID NO: 1662 - RNA, 19 nt, synthetic construct
  source 1..19: mol_type = other RNA
gcctaagcttccccagtag

SEQ ID NO: 1663 - RNA, 19 nt, synthetic construct
  source 1..19: mol_type = other RNA
gcattatgactgcacctgt

SEQ ID NO: 1664 - RNA, 19 nt, synthetic construct
  source 1..19: mol_type = other RNA
cctaagcttccccagtagc

SEQ ID NO: 1665 - RNA, 19 nt, synthetic construct
  source 1..19: mol_type = other RNA
cattatgactgcacctgtg

SEQ ID NO: 1666 - RNA, 19 nt, synthetic construct
  source 1..19: mol_type = other RNA
ctaagcttccccagtagct

SEQ ID NO: 1667 - RNA, 19 nt, synthetic construct
  source 1..19: mol_type = other RNA
attatgactgcacctgtga

SEQ ID NO: 1668 - RNA, 19 nt, synthetic construct
  source 1..19: mol_type = other RNA
taagcttccccagtagctg

SEQ ID NO: 1669 - RNA, 19 nt, synthetic construct
  source 1..19: mol_type = other RNA
ttatgactgcacctgtgaa

SEQ ID NO: 1670 - RNA, 19 nt, synthetic construct
  source 1..19: mol_type = other RNA
aagcttccccagtagctgg

SEQ ID NO: 1671 - RNA, 19 nt, synthetic construct
  source 1..19: mol_type = other RNA
tatgactgcacctgtgaat

SEQ ID NO: 1672 - RNA, 19 nt, synthetic construct
  source 1..19: mol_type = other RNA
agcttccccagtagctggg

SEQ ID NO: 1673 - RNA, 19 nt, synthetic construct
  source 1..19: mol_type = other RNA
atgactgcacctgtgaata

SEQ ID NO: 1674 - RNA, 19 nt, synthetic construct
  source 1..19: mol_type = other RNA
gcttccccagtagctggga

SEQ ID NO: 1675 - RNA, 19 nt, synthetic construct
  source 1..19: mol_type = other RNA
tgactgcacctgtgaatag

SEQ ID NO: 1676 - RNA, 19 nt, synthetic construct
  source 1..19: mol_type = other RNA
cttccccagtagctgggat

SEQ ID NO: 1677 - RNA, 19 nt, synthetic construct
  source 1..19: mol_type = other RNA
gactgcacctgtgaatagc

SEQ ID NO: 1678 - RNA, 19 nt, synthetic construct
  source 1..19: mol_type = other RNA
ttccccagtagctgggatt

SEQ ID NO: 1679 - RNA, 19 nt, synthetic construct
  source 1..19: mol_type = other RNA
actgcacctgtgaatagcc

SEQ ID NO: 1680 - RNA, 19 nt, synthetic construct
  source 1..19: mol_type = other RNA
tccccagtagctgggatta

SEQ ID NO: 1681 - RNA, 19 nt, synthetic construct
  source 1..19: mol_type = other RNA
ctgcacctgtgaatagcca

SEQ ID NO: 1682 - RNA, 19 nt, synthetic construct
  source 1..19: mol_type = other RNA
ccccagtagctgggattac

SEQ ID NO: 1683 - RNA, 19 nt, synthetic construct
  source 1..19: mol_type = other RNA
tgcacctgtgaatagccac

SEQ ID NO: 1684 - RNA, 19 nt, synthetic construct
  source 1..19: mol_type = other RNA
cccagtagctgggattaca

SEQ ID NO: 1685 - RNA, 19 nt, synthetic construct
  source 1..19: mol_type = other RNA
gcacctgtgaatagccact

SEQ ID NO: 1686 - RNA, 19 nt, synthetic construct
  source 1..19: mol_type = other RNA
ccagtagctgggattacaa

SEQ ID NO: 1687 - RNA, 19 nt, synthetic construct
  source 1..19: mol_type = other RNA
cacctgtgaatagccactg

SEQ ID NO: 1688 - RNA, 19 nt, synthetic construct
  source 1..19: mol_type = other RNA
cagtagctgggattacaag

SEQ ID NO: 1689 - RNA, 19 nt, synthetic construct
  source 1..19: mol_type = other RNA
acctgtgaatagccactgc

SEQ ID NO: 1690 - RNA, 19 nt, synthetic construct
  source 1..19: mol_type = other RNA
agtagctgggattacaagc

SEQ ID NO: 1691 - RNA, 19 nt, synthetic construct
  source 1..19: mol_type = other RNA
cctgtgaatagccactgca

SEQ ID NO: 1692 - RNA, 19 nt, synthetic construct
  source 1..19: mol_type = other RNA
gtagctgggattacaagcg

SEQ ID NO: 1693 - RNA, 19 nt, synthetic construct
  source 1..19: mol_type = other RNA
ctgtgaatagccactgcat

SEQ ID NO: 1694 - RNA, 19 nt, synthetic construct
  source 1..19: mol_type = other RNA
tagctgggattacaagcgt

SEQ ID NO: 1695 - RNA, 19 nt, synthetic construct
  source 1..19: mol_type = other RNA
tgtgaatagccactgcatt

SEQ ID NO: 1696 - RNA, 19 nt, synthetic construct
  source 1..19: mol_type = other RNA
agctgggattacaagcgtg

SEQ ID NO: 1697 - RNA, 19 nt, synthetic construct
  source 1..19: mol_type = other RNA
gtgaatagccactgcattc

SEQ ID NO: 1698 - RNA, 19 nt, synthetic construct
  source 1..19: mol_type = other RNA
gctgggattacaagcgtgc

SEQ ID NO: 1699 - RNA, 19 nt, synthetic construct
  source 1..19: mol_type = other RNA
tgaatagccactgcattcc

SEQ ID NO: 1700 - RNA, 19 nt, synthetic construct
  source 1..19: mol_type = other RNA
ctgggattacaagcgtgca

SEQ ID NO: 1701 - RNA, 19 nt, synthetic construct
  source 1..19: mol_type = other RNA
gaatagccactgcattcca

SEQ ID NO: 1702 - RNA, 19 nt, synthetic construct
  source 1..19: mol_type = other RNA
tgggattacaagcgtgcat

SEQ ID NO: 1703 - RNA, 19 nt, synthetic construct
  source 1..19: mol_type = other RNA
aatagccactgcattccag

SEQ ID NO: 1704 - RNA, 19 nt, synthetic construct
  source 1..19: mol_type = other RNA
gggattacaagcgtgcatc

SEQ ID NO: 1705 - RNA, 19 nt, synthetic construct
  source 1..19: mol_type = other RNA
atagccactgcattccagc

SEQ ID NO: 1706 - RNA, 19 nt, synthetic construct
  source 1..19: mol_type = other RNA
ggattacaagcgtgcatcc

SEQ ID NO: 1707 - RNA, 19 nt, synthetic construct
  source 1..19: mol_type = other RNA
tagccactgcattccagcc

SEQ ID NO: 1708 - RNA, 19 nt, synthetic construct
  source 1..19: mol_type = other RNA
gattacaagcgtgcatccc

SEQ ID NO: 1709 - RNA, 19 nt, synthetic construct
  source 1..19: mol_type = other RNA
agccactgcattccagccc

SEQ ID NO: 1710 - RNA, 19 nt, synthetic construct
  source 1..19: mol_type = other RNA
attacaagcgtgcatccct

SEQ ID NO: 1711 - RNA, 19 nt, synthetic construct
  source 1..19: mol_type = other RNA
gccactgcattccagccct

SEQ ID NO: 1712 - RNA, 19 nt, synthetic construct
  source 1..19: mol_type = other RNA
ttacaagcgtgcatccctg

SEQ ID NO: 1713 - RNA, 19 nt, synthetic construct
  source 1..19: mol_type = other RNA
ccactgcattccagccctt

SEQ ID NO: 1714 - RNA, 19 nt, synthetic construct
  source 1..19: mol_type = other RNA
tacaagcgtgcatccctgt

SEQ ID NO: 1715 - RNA, 19 nt, synthetic construct
  source 1..19: mol_type = other RNA
cactgcattccagccctta

SEQ ID NO: 1716 - RNA, 19 nt, synthetic construct
  source 1..19: mol_type = other RNA
acaagcgtgcatccctgtg

SEQ ID NO: 1717 - RNA, 19 nt, synthetic construct
  source 1..19: mol_type = other RNA
actgcattccagcccttag

SEQ ID NO: 1718 - RNA, 19 nt, synthetic construct
  source 1..19: mol_type = other RNA
caagcgtgcatccctgtgc

SEQ ID NO: 1719 - RNA, 19 nt, synthetic construct
  source 1..19: mol_type = other RNA
ctgcattccagcccttagc

SEQ ID NO: 1720 - RNA, 19 nt, synthetic construct
  source 1..19: mol_type = other RNA
aagcgtgcatccctgtgcc

SEQ ID NO: 1721 - RNA, 19 nt, synthetic construct
  source 1..19: mol_type = other RNA
tgcattccagcccttagcg

SEQ ID NO: 1722 - RNA, 19 nt, synthetic construct
  source 1..19: mol_type = other RNA
agcgtgcatccctgtgccc

SEQ ID NO: 1723 - RNA, 19 nt, synthetic construct
  source 1..19: mol_type = other RNA
gcattccagcccttagcga

SEQ ID NO: 1724 - RNA, 19 nt, synthetic construct
  source 1..19: mol_type = other RNA
gcgtgcatccctgtgcccc

SEQ ID NO: 1725 - RNA, 19 nt, synthetic construct
  source 1..19: mol_type = other RNA
cattccagcccttagcgag

SEQ ID NO: 1726 - RNA, 19 nt, synthetic construct
  source 1..19: mol_type = other RNA
cgtgcatccctgtgcccca

SEQ ID NO: 1727 - RNA, 19 nt, synthetic construct
  source 1..19: mol_type = other RNA
attccagcccttagcgaga

SEQ ID NO: 1728 - RNA, 19 nt, synthetic construct
  source 1..19: mol_type = other RNA
gtgcatccctgtgccccag

SEQ ID NO: 1729 - RNA, 19 nt, synthetic construct
  source 1..19: mol_type = other RNA
ttccagcccttagcgagac

SEQ ID NO: 1730 - RNA, 19 nt, synthetic construct
  source 1..19: mol_type = other RNA
tgcatccctgtgccccagt

SEQ ID NO: 1731 - RNA, 19 nt, synthetic construct
  source 1..19: mol_type = other RNA
tccagcccttagcgagacc

SEQ ID NO: 1732 - RNA, 19 nt, synthetic construct
  source 1..19: mol_type = other RNA
gcatccctgtgccccagtg

SEQ ID NO: 1733 - RNA, 19 nt, synthetic construct
  source 1..19: mol_type = other RNA
ccagcccttagcgagacct

SEQ ID NO: 1734 - RNA, 19 nt, synthetic construct
  source 1..19: mol_type = other RNA
catccctgtgccccagtga

SEQ ID NO: 1735 - RNA, 19 nt, synthetic construct
  source 1..19: mol_type = other RNA
cagcccttagcgagacctt

SEQ ID NO: 1736 - RNA, 19 nt, synthetic construct
  source 1..19: mol_type = other RNA
atccctgtgccccagtgat

SEQ ID NO: 1737 - RNA, 19 nt, synthetic construct
  source 1..19: mol_type = other RNA
agcccttagcgagaccttg

SEQ ID NO: 1738 - RNA, 19 nt, synthetic construct
  source 1..19: mol_type = other RNA
tccctgtgccccagtgatt

SEQ ID NO: 1739 - RNA, 19 nt, synthetic construct
  source 1..19: mol_type = other RNA
gcccttagcgagaccttgc

SEQ ID NO: 1740 - RNA, 19 nt, synthetic construct
  source 1..19: mol_type = other RNA
ccctgtgccccagtgatta

SEQ ID NO: 1741 - RNA, 19 nt, synthetic construct
  source 1..19: mol_type = other RNA
cccttagcgagaccttgcc

SEQ ID NO: 1742 - RNA, 19 nt, synthetic construct
  source 1..19: mol_type = other RNA
cctgtgccccagtgattaa

SEQ ID NO: 1743 - RNA, 19 nt, synthetic construct
  source 1..19: mol_type = other RNA
ccttagcgagaccttgcct

SEQ ID NO: 1744 - RNA, 19 nt, synthetic construct
  source 1..19: mol_type = other RNA
ctgtgccccagtgattaag

SEQ ID NO: 1745 - RNA, 19 nt, synthetic construct
  source 1..19: mol_type = other RNA
cttagcgagaccttgcctc

SEQ ID NO: 1746 - RNA, 19 nt, synthetic construct
  source 1..19: mol_type = other RNA
tgtgccccagtgattaagt

SEQ ID NO: 1747 - RNA, 19 nt, synthetic construct
  source 1..19: mol_type = other RNA
ttagcgagaccttgcctca

SEQ ID NO: 1748 - RNA, 19 nt, synthetic construct
  source 1..19: mol_type = other RNA
gtgccccagtgattaagtt

SEQ ID NO: 1749 - RNA, 19 nt, synthetic construct
  source 1..19: mol_type = other RNA
tagcgagaccttgcctcaa

SEQ ID NO: 1750 - RNA, 19 nt, synthetic construct
  source 1..19: mol_type = other RNA
tgccccagtgattaagttt

SEQ ID NO: 1751 - RNA, 19 nt, synthetic construct
  source 1..19: mol_type = other RNA
agcgagaccttgcctcaag

SEQ ID NO: 1752 - RNA, 19 nt, synthetic construct
  source 1..19: mol_type = other RNA
gccccagtgattaagtttt

SEQ ID NO: 1753 - RNA, 19 nt, synthetic construct
  source 1..19: mol_type = other RNA
gcgagaccttgcctcaaga

SEQ ID NO: 1754 - RNA, 19 nt, synthetic construct
  source 1..19: mol_type = other RNA
ccccagtgattaagtttta

SEQ ID NO: 1755 - RNA, 19 nt, synthetic construct
  source 1..19: mol_type = other RNA
cgagaccttgcctcaagac

SEQ ID NO: 1756 - RNA, 19 nt, synthetic construct
  source 1..19: mol_type = other RNA
cccagtgattaagttttat

SEQ ID NO: 1757 - RNA, 19 nt, synthetic construct
  source 1..19: mol_type = other RNA
gagaccttgcctcaagact

SEQ ID NO: 1758 - RNA, 19 nt, synthetic construct
  source 1..19: mol_type = other RNA
ccagtgattaagttttatt

SEQ ID NO: 1759 - RNA, 19 nt, synthetic construct
  source 1..19: mol_type = other RNA
agaccttgcctcaagactt

SEQ ID NO: 1760 - RNA, 19 nt, synthetic construct
  source 1..19: mol_type = other RNA
cagtgattaagttttatta

SEQ ID NO: 1761 - RNA, 19 nt, synthetic construct
  source 1..19: mol_type = other RNA
gaccttgcctcaagacttt

SEQ ID NO: 1762 - RNA, 19 nt, synthetic construct
  source 1..19: mol_type = other RNA
agtgattaagttttattat

SEQ ID NO: 1763 - RNA, 19 nt, synthetic construct
  source 1..19: mol_type = other RNA
accttgcctcaagactttg

SEQ ID NO: 1764 - RNA, 19 nt, synthetic construct
  source 1..19: mol_type = other RNA
gtgattaagttttattatg

SEQ ID NO: 1765 - RNA, 19 nt, synthetic construct
  source 1..19: mol_type = other RNA
ccttgcctcaagactttgg

SEQ ID NO: 1766 - RNA, 19 nt, synthetic construct
  source 1..19: mol_type = other RNA
tgattaagttttattatgt

SEQ ID NO: 1767 - RNA, 19 nt, synthetic construct
  source 1..19: mol_type = other RNA
cttgcctcaagactttggg

SEQ ID NO: 1768 - RNA, 19 nt, synthetic construct
  source 1..19: mol_type = other RNA
gattaagttttattatgta

SEQ ID NO: 1769 - RNA, 19 nt, synthetic construct
  source 1..19: mol_type = other RNA
ttgcctcaagactttgggg

SEQ ID NO: 1770 - RNA, 19 nt, synthetic construct
  source 1..19: mol_type = other RNA
attaagttttattatgtag

SEQ ID NO: 1771 - RNA, 19 nt, synthetic construct
  source 1..19: mol_type = other RNA
tgcctcaagactttgggga

SEQ ID NO: 1772 - RNA, 19 nt, synthetic construct
  source 1..19: mol_type = other RNA
ttaagttttattatgtaga

SEQ ID NO: 1773 - RNA, 19 nt, synthetic construct
  source 1..19: mol_type = other RNA
gcctcaagactttggggag

SEQ ID NO: 1774 - DNA, 20 bp, synthetic construct
  source 1..20: mol_type = other DNA
agttttggagtcatctcatt

SEQ ID NO: 1775 - DNA, 21 bp, synthetic construct
  source 1..21: mol_type = other DNA
agttttggagtcatctcatta

SEQ ID NO: 1776 - DNA, 20 bp, synthetic construct
  source 1..20: mol_type = other DNA
gttttggagtcatctcatta

SEQ ID NO: 1777 - DNA, 21 bp, synthetic construct
  source 1..21: mol_type = other DNA
gttttggagtcatctcattat

SEQ ID NO: 1778 - DNA, 20 bp, synthetic construct
  source 1..20: mol_type = other DNA
ttttggagtcatctcattat

SEQ ID NO: 1779 - DNA, 21 bp, synthetic construct
  source 1..21: mol_type = other DNA
ttttggagtcatctcattata

SEQ ID NO: 1780 - DNA, 20 bp, synthetic construct
  source 1..20: mol_type = other DNA
tttggagtcatctcattata

SEQ ID NO: 1781 - DNA, 21 bp, synthetic construct
  source 1..21: mol_type = other DNA
tttggagtcatctcattatat

SEQ ID NO: 1782 - DNA, 20 bp, synthetic construct
  source 1..20: mol_type = other DNA
ttggagtcatctcattatat

SEQ ID NO: 1783 - DNA, 21 bp, synthetic construct
  source 1..21: mol_type = other DNA
ttggagtcatctcattatata

SEQ ID NO: 1784 - DNA, 20 bp, synthetic construct
  source 1..20: mol_type = other DNA
tggagtcatctcattatata

SEQ ID NO: 1785 - DNA, 21 bp, synthetic construct
  source 1..21: mol_type = other DNA
tggagtcatctcattatataa

SEQ ID NO: 1786 - DNA, 20 bp, synthetic construct
  source 1..20: mol_type = other DNA
ggagtcatctcattatataa

SEQ ID NO: 1787 - DNA, 21 bp, synthetic construct
  source 1..21: mol_type = other DNA
ggagtcatctcattatataac

SEQ ID NO: 1788 - DNA, 20 bp, synthetic construct
  source 1..20: mol_type = other DNA
gagtcatctcattatataac

SEQ ID NO: 1789 - DNA, 21 bp, synthetic construct
  source 1..21: mol_type = other DNA
gagtcatctcattatataacc

SEQ ID NO: 1790 - DNA, 20 bp, synthetic construct
  source 1..20: mol_type = other DNA
agtcatctcattatataacc

SEQ ID NO: 1791 - DNA, 21 bp, synthetic construct
  source 1..21: mol_type = other DNA
agtcatctcattatataacca

SEQ ID NO: 1792 - DNA, 20 bp, synthetic construct
  source 1..20: mol_type = other DNA
gtcatctcattatataacca

SEQ ID NO: 1793 - DNA, 21 bp, synthetic construct
  source 1..21: mol_type = other DNA
gtcatctcattatataaccat

SEQ ID NO: 1794 - DNA, 20 bp, synthetic construct
  source 1..20: mol_type = other DNA
tcatctcattatataaccat

SEQ ID NO: 1795 - DNA, 21 bp, synthetic construct
  source 1..21: mol_type = other DNA
tcatctcattatataaccatc

SEQ ID NO: 1796 - DNA, 20 bp, synthetic construct
  source 1..20: mol_type = other DNA
catctcattatataaccatc

SEQ ID NO: 1797 - DNA, 21 bp, synthetic construct
  source 1..21: mol_type = other DNA
catctcattatataaccatcc

SEQ ID NO: 1798 - DNA, 20 bp, synthetic construct
  source 1..20: mol_type = other DNA
atctcattatataaccatcc

SEQ ID NO: 1799 - DNA, 21 bp, synthetic construct
  source 1..21: mol_type = other DNA
atctcattatataaccatccc

SEQ ID NO: 1800 - DNA, 20 bp, synthetic construct
  source 1..20: mol_type = other DNA
tctcattatataaccatccc

SEQ ID NO: 1801 - DNA, 21 bp, synthetic construct
  source 1..21: mol_type = other DNA
tctcattatataaccatcccc

SEQ ID NO: 1802 - DNA, 20 bp, synthetic construct
  source 1..20: mol_type = other DNA
ctcattatataaccatcccc

SEQ ID NO: 1803 - DNA, 21 bp, synthetic construct
  source 1..21: mol_type = other DNA
ctcattatataaccatcccca

SEQ ID NO: 1804 - DNA, 20 bp, synthetic construct
  source 1..20: mol_type = other DNA
tcattatataaccatcccca

SEQ ID NO: 1805 - DNA, 21 bp, synthetic construct
  source 1..21: mol_type = other DNA
tcattatataaccatccccaa

SEQ ID NO: 1806 - DNA, 20 bp, synthetic construct
  source 1..20: mol_type = other DNA
cattatataaccatccccaa

SEQ ID NO: 1807 - DNA, 21 bp, synthetic construct
  source 1..21: mol_type = other DNA
cattatataaccatccccaag

SEQ ID NO: 1808 - DNA, 20 bp, synthetic construct
  source 1..20: mol_type = other DNA
attatataaccatccccaag

SEQ ID NO: 1809 - DNA, 21 bp, synthetic construct
  source 1..21: mol_type = other DNA
attatataaccatccccaagg

SEQ ID NO: 1810 - DNA, 20 bp, synthetic construct
  source 1..20: mol_type = other DNA
ttatataaccatccccaagg

SEQ ID NO: 1811 - DNA, 21 bp, synthetic construct
  source 1..21: mol_type = other DNA
ttatataaccatccccaaggt

SEQ ID NO: 1812 - DNA, 20 bp, synthetic construct
  source 1..20: mol_type = other DNA
tatataaccatccccaaggt

SEQ ID NO: 1813 - DNA, 21 bp, synthetic construct
  source 1..21: mol_type = other DNA
tatataaccatccccaaggtc

SEQ ID NO: 1814 - DNA, 20 bp, synthetic construct
  source 1..20: mol_type = other DNA
atataaccatccccaaggtc

SEQ ID NO: 1815 - DNA, 21 bp, synthetic construct
  source 1..21: mol_type = other DNA
atataaccatccccaaggtca

SEQ ID NO: 1816 - DNA, 20 bp, synthetic construct
  source 1..20: mol_type = other DNA
tataaccatccccaaggtca

SEQ ID NO: 1817 - DNA, 21 bp, synthetic construct
  source 1..21: mol_type = other DNA
tataaccatccccaaggtcaa

SEQ ID NO: 1818 - DNA, 20 bp, synthetic construct
  source 1..20: mol_type = other DNA
ataaccatccccaaggtcaa

SEQ ID NO: 1819 - DNA, 21 bp, synthetic construct
  source 1..21: mol_type = other DNA
ataaccatccccaaggtcaac

SEQ ID NO: 1820 - DNA, 20 bp, synthetic construct
  source 1..20: mol_type = other DNA
taaccatccccaaggtcaac

SEQ ID NO: 1821 - DNA, 21 bp, synthetic construct
  source 1..21: mol_type = other DNA
taaccatccccaaggtcaaca

SEQ ID NO: 1822 - DNA, 20 bp, synthetic construct
  source 1..20: mol_type = other DNA
aaccatccccaaggtcaaca

SEQ ID NO: 1823 - DNA, 21 bp, synthetic construct
  source 1..21: mol_type = other DNA
aaccatccccaaggtcaacat

SEQ ID NO: 1824 - DNA, 20 bp, synthetic construct
  source 1..20: mol_type = other DNA
accatccccaaggtcaacat

SEQ ID NO: 1825 - DNA, 21 bp, synthetic construct
  source 1..21: mol_type = other DNA
accatccccaaggtcaacatc

SEQ ID NO: 1826 - DNA, 20 bp, synthetic construct
  source 1..20: mol_type = other DNA
ccatccccaaggtcaacatc

SEQ ID NO: 1827 - DNA, 21 bp, synthetic construct
  source 1..21: mol_type = other DNA
ccatccccaaggtcaacatct

SEQ ID NO: 1828 - DNA, 20 bp, synthetic construct
  source 1..20: mol_type = other DNA
catccccaaggtcaacatct

SEQ ID NO: 1829 - DNA, 21 bp, synthetic construct
  source 1..21: mol_type = other DNA
catccccaaggtcaacatctg

SEQ ID NO: 1830 - DNA, 20 bp, synthetic construct
  source 1..20: mol_type = other DNA
atccccaaggtcaacatctg

SEQ ID NO: 1831 - DNA, 21 bp, synthetic construct
  source 1..21: mol_type = other DNA
atccccaaggtcaacatctga

SEQ ID NO: 1832 - DNA, 20 bp, synthetic construct
  source 1..20: mol_type = other DNA
tccccaaggtcaacatctga

SEQ ID NO: 1833 - DNA, 21 bp, synthetic construct
  source 1..21: mol_type = other DNA
tccccaaggtcaacatctgac

SEQ ID NO: 1834 - DNA, 20 bp, synthetic construct
  source 1..20: mol_type = other DNA
ccccaaggtcaacatctgac

SEQ ID NO: 1835 - DNA, 21 bp, synthetic construct
  source 1..21: mol_type = other DNA
ccccaaggtcaacatctgact

SEQ ID NO: 1836 - DNA, 20 bp, synthetic construct
  source 1..20: mol_type = other DNA
cccaaggtcaacatctgact

SEQ ID NO: 1837 - DNA, 21 bp, synthetic construct
  source 1..21: mol_type = other DNA
cccaaggtcaacatctgactc

SEQ ID NO: 1838 - DNA, 20 bp, synthetic construct
  source 1..20: mol_type = other DNA
ccaaggtcaacatctgactc

SEQ ID NO: 1839 - DNA, 21 bp, synthetic construct
  source 1..21: mol_type = other DNA
ccaaggtcaacatctgactca

SEQ ID NO: 1840 - DNA, 20 bp, synthetic construct
  source 1..20: mol_type = other DNA
caaggtcaacatctgactca

SEQ ID NO: 1841 - DNA, 21 bp, synthetic construct
  source 1..21: mol_type = other DNA
caaggtcaacatctgactcag

SEQ ID NO: 1842 - DNA, 20 bp, synthetic construct
  source 1..20: mol_type = other DNA
aaggtcaacatctgactcag

SEQ ID NO: 1843 - DNA, 21 bp, synthetic construct
  source 1..21: mol_type = other DNA
aaggtcaacatctgactcaga

SEQ ID NO: 1844 - DNA, 20 bp, synthetic construct
  source 1..20: mol_type = other DNA
aggtcaacatctgactcaga

SEQ ID NO: 1845 - DNA, 21 bp, synthetic construct
  source 1..21: mol_type = other DNA
aggtcaacatctgactcagaa

SEQ ID NO: 1846 - DNA, 20 bp, synthetic construct
  source 1..20: mol_type = other DNA
ggtcaacatctgactcagaa

SEQ ID NO: 1847 - DNA, 21 bp, synthetic construct
  source 1..21: mol_type = other DNA
ggtcaacatctgactcagaag

SEQ ID NO: 1848 - DNA, 20 bp, synthetic construct
  source 1..20: mol_type = other DNA
gtcaacatctgactcagaag

SEQ ID NO: 1849 - DNA, 21 bp, synthetic construct
  source 1..21: mol_type = other DNA
gtcaacatctgactcagaagt

SEQ ID NO: 1850 - DNA, 20 bp, synthetic construct
  source 1..20: mol_type = other DNA
tcaacatctgactcagaagt

SEQ ID NO: 1851 - DNA, 21 bp, synthetic construct
  source 1..21: mol_type = other DNA
tcaacatctgactcagaagtg

SEQ ID NO: 1852 - DNA, 20 bp, synthetic construct
  source 1..20: mol_type = other DNA
caacatctgactcagaagtg

SEQ ID NO: 1853 - DNA, 21 bp, synthetic construct
  source 1..21: mol_type = other DNA
caacatctgactcagaagtgt

SEQ ID NO: 1854 - DNA, 20 bp, synthetic construct
  source 1..20: mol_type = other DNA
aacatctgactcagaagtgt

SEQ ID NO: 1855 - DNA, 21 bp, synthetic construct
  source 1..21: mol_type = other DNA
aacatctgactcagaagtgtc

SEQ ID NO: 1856 - DNA, 20 bp, synthetic construct
  source 1..20: mol_type = other DNA
acatctgactcagaagtgtc

SEQ ID NO: 1857 - DNA, 21 bp, synthetic construct
  source 1..21: mol_type = other DNA
acatctgactcagaagtgtca

SEQ ID NO: 1858 - DNA, 20 bp, synthetic construct
  source 1..20: mol_type = other DNA
catctgactcagaagtgtca

SEQ ID NO: 1859 - DNA, 21 bp, synthetic construct
  source 1..21: mol_type = other DNA
catctgactcagaagtgtcac

SEQ ID NO: 1860 - DNA, 20 bp, synthetic construct
  source 1..20: mol_type = other DNA
atctgactcagaagtgtcac

SEQ ID NO: 1861 - DNA, 21 bp, synthetic construct
  source 1..21: mol_type = other DNA
atctgactcagaagtgtcact

SEQ ID NO: 1862 - DNA, 20 bp, synthetic construct
  source 1..20: mol_type = other DNA
tctgactcagaagtgtcact

SEQ ID NO: 1863 - DNA, 21 bp, synthetic construct
  source 1..21: mol_type = other DNA
tctgactcagaagtgtcactt

SEQ ID NO: 1864 - DNA, 20 bp, synthetic construct
  source 1..20: mol_type = other DNA
ctgactcagaagtgtcactt

SEQ ID NO: 1865 - DNA, 21 bp, synthetic construct
  source 1..21: mol_type = other DNA
ctgactcagaagtgtcacttt

SEQ ID NO: 1866 - DNA, 20 bp, synthetic construct
  source 1..20: mol_type = other DNA
tgactcagaagtgtcacttt

SEQ ID NO: 1867 - DNA, 21 bp, synthetic construct
  source 1..21: mol_type = other DNA
tgactcagaagtgtcactttg

SEQ ID NO: 1868 - DNA, 20 bp, synthetic construct
  source 1..20: mol_type = other DNA
gactcagaagtgtcactttg

SEQ ID NO: 1869 - DNA, 21 bp, synthetic construct
  source 1..21: mol_type = other DNA
gactcagaagtgtcactttga

SEQ ID NO: 1870 - DNA, 20 bp, synthetic construct
  source 1..20: mol_type = other DNA
actcagaagtgtcactttga

SEQ ID NO: 1871 - DNA, 21 bp, synthetic construct
  source 1..21: mol_type = other DNA
actcagaagtgtcactttgat

SEQ ID NO: 1872 - DNA, 20 bp, synthetic construct
  source 1..20: mol_type = other DNA
ctcagaagtgtcactttgat

SEQ ID NO: 1873 - DNA, 21 bp, synthetic construct
  source 1..21: mol_type = other DNA
ctcagaagtgtcactttgatc

SEQ ID NO: 1874 - DNA, 20 bp, synthetic construct
  source 1..20: mol_type = other DNA
tcagaagtgtcactttgatc

SEQ ID NO: 1875 - DNA, 21 bp, synthetic construct
  source 1..21: mol_type = other DNA
tcagaagtgtcactttgatca

SEQ ID NO: 1876 - DNA, 20 bp, synthetic construct
  source 1..20: mol_type = other DNA
cagaagtgtcactttgatca

SEQ ID NO: 1877 - DNA, 21 bp, synthetic construct
  source 1..21: mol_type = other DNA
cagaagtgtcactttgatcag

SEQ ID NO: 1878 - DNA, 20 bp, synthetic construct
  source 1..20: mol_type = other DNA
agaagtgtcactttgatcag

SEQ ID NO: 1879 - DNA, 21 bp, synthetic construct
  source 1..21: mol_type = other DNA
agaagtgtcactttgatcaga

SEQ ID NO: 1880 - DNA, 20 bp, synthetic construct
  source 1..20: mol_type = other DNA
gaagtgtcactttgatcaga

SEQ ID NO: 1881 - DNA, 21 bp, synthetic construct
  source 1..21: mol_type = other DNA
gaagtgtcactttgatcagat

SEQ ID NO: 1882 - DNA, 20 bp, synthetic construct
  source 1..20: mol_type = other DNA
aagtgtcactttgatcagat

SEQ ID NO: 1883 - DNA, 21 bp, synthetic construct
  source 1..21: mol_type = other DNA
aagtgtcactttgatcagatg

SEQ ID NO: 1884 - DNA, 20 bp, synthetic construct
  source 1..20: mol_type = other DNA
agtgtcactttgatcagatg

SEQ ID NO: 1885 - DNA, 21 bp, synthetic construct
  source 1..21: mol_type = other DNA
agtgtcactttgatcagatgg

SEQ ID NO: 1886 - DNA, 20 bp, synthetic construct
  source 1..20: mol_type = other DNA
gtgtcactttgatcagatgg

SEQ ID NO: 1887 - DNA, 21 bp, synthetic construct
  source 1..21: mol_type = other DNA
gtgtcactttgatcagatgga

SEQ ID NO: 1888 - DNA, 20 bp, synthetic construct
  source 1..20: mol_type = other DNA
tgtcactttgatcagatgga

SEQ ID NO: 1889 - DNA, 21 bp, synthetic construct
  source 1..21: mol_type = other DNA
tgtcactttgatcagatggag

SEQ ID NO: 1890 - DNA, 20 bp, synthetic construct
  source 1..20: mol_type = other DNA
gtcactttgatcagatggag

SEQ ID NO: 1891 - DNA, 21 bp, synthetic construct
  source 1..21: mol_type = other DNA
gtcactttgatcagatggagc

SEQ ID NO: 1892 - DNA, 20 bp, synthetic construct
  source 1..20: mol_type = other DNA
tcactttgatcagatggagc

SEQ ID NO: 1893 - DNA, 21 bp, synthetic construct
  source 1..21: mol_type = other DNA
tcactttgatcagatggagca

SEQ ID NO: 1894 - DNA, 20 bp, synthetic construct
  source 1..20: mol_type = other DNA
cactttgatcagatggagca

SEQ ID NO: 1895 - DNA, 21 bp, synthetic construct
  source 1..21: mol_type = other DNA
cactttgatcagatggagcat

SEQ ID NO: 1896 - DNA, 20 bp, synthetic construct
  source 1..20: mol_type = other DNA
actttgatcagatggagcat

SEQ ID NO: 1897 - DNA, 21 bp, synthetic construct
  source 1..21: mol_type = other DNA
actttgatcagatggagcatc

SEQ ID NO: 1898 - DNA, 20 bp, synthetic construct
  source 1..20: mol_type = other DNA
ctttgatcagatggagcatc

SEQ ID NO: 1899 - DNA, 21 bp, synthetic construct
  source 1..21: mol_type = other DNA
ctttgatcagatggagcatct

SEQ ID NO: 1900 - DNA, 20 bp, synthetic construct
  source 1..20: mol_type = other DNA
tttgatcagatggagcatct

SEQ ID NO: 1901 - DNA, 21 bp, synthetic construct
  source 1..21: mol_type = other DNA
tttgatcagatggagcatctt

SEQ ID NO: 1902 - DNA, 20 bp, synthetic construct
  source 1..20: mol_type = other DNA
ttgatcagatggagcatctt

SEQ ID NO: 1903 - DNA, 21 bp, synthetic construct
  source 1..21: mol_type = other DNA
ttgatcagatggagcatcttc

SEQ ID NO: 1904 - DNA, 20 bp, synthetic construct
  source 1..20: mol_type = other DNA
tgatcagatggagcatcttc

SEQ ID NO: 1905 - DNA, 21 bp, synthetic construct
  source 1..21: mol_type = other DNA
tgatcagatggagcatcttcg

SEQ ID NO: 1906 - DNA, 20 bp, synthetic construct
  source 1..20: mol_type = other DNA
gatcagatggagcatcttcg

SEQ ID NO: 1907 - DNA, 21 bp, synthetic construct
  source 1..21: mol_type = other DNA
gatcagatggagcatcttcgg

SEQ ID NO: 1908 - DNA, 20 bp, synthetic construct
  source 1..20: mol_type = other DNA
atcagatggagcatcttcgg

SEQ ID NO: 1909 - DNA, 21 bp, synthetic construct
  source 1..21: mol_type = other DNA
atcagatggagcatcttcgga

SEQ ID NO: 1910 - DNA, 20 bp, synthetic construct
  source 1..20: mol_type = other DNA
tcagatggagcatcttcgga

SEQ ID NO: 1911 - DNA, 21 bp, synthetic construct
  source 1..21: mol_type = other DNA
tcagatggagcatcttcggac

SEQ ID NO: 1912 - DNA, 20 bp, synthetic construct
  source 1..20: mol_type = other DNA
cagatggagcatcttcggac

SEQ ID NO: 1913 - DNA, 21 bp, synthetic construct
  source 1..21: mol_type = other DNA
cagatggagcatcttcggacc

SEQ ID NO: 1914 - DNA, 20 bp, synthetic construct
  source 1..20: mol_type = other DNA
agatggagcatcttcggacc

SEQ ID NO: 1915 - DNA, 21 bp, synthetic construct
  source 1..21: mol_type = other DNA
agatggagcatcttcggacca

SEQ ID NO: 1916 - DNA, 20 bp, synthetic construct
  source 1..20: mol_type = other DNA
gatggagcatcttcggacca

SEQ ID NO: 1917 - DNA, 21 bp, synthetic construct
  source 1..21: mol_type = other DNA
gatggagcatcttcggaccac

SEQ ID NO: 1918 - DNA, 20 bp, synthetic construct
  source 1..20: mol_type = other DNA
atggagcatcttcggaccac

SEQ ID NO: 1919 - DNA, 21 bp, synthetic construct
  source 1..21: mol_type = other DNA
atggagcatcttcggaccaca

SEQ ID NO: 1920 - DNA, 20 bp, synthetic construct
  source 1..20: mol_type = other DNA
tggagcatcttcggaccaca

SEQ ID NO: 1921 - DNA, 21 bp, synthetic construct
  source 1..21: mol_type = other DNA
tggagcatcttcggaccacag

SEQ ID NO: 1922 - DNA, 20 bp, synthetic construct
  source 1..20: mol_type = other DNA
ggagcatcttcggaccacag

SEQ ID NO: 1923 - DNA, 21 bp, synthetic construct
  source 1..21: mol_type = other DNA
ggagcatcttcggaccacagg

SEQ ID NO: 1924 - DNA, 20 bp, synthetic construct
  source 1..20: mol_type = other DNA
gagcatcttcggaccacagg

SEQ ID NO: 1925 - DNA, 21 bp, synthetic construct
  source 1..21: mol_type = other DNA
gagcatcttcggaccacaggc

SEQ ID NO: 1926 - DNA, 20 bp, synthetic construct
  source 1..20: mol_type = other DNA
agcatcttcggaccacaggc

SEQ ID NO: 1927 - DNA, 21 bp, synthetic construct
  source 1..21: mol_type = other DNA
agcatcttcggaccacaggcc

SEQ ID NO: 1928 - DNA, 20 bp, synthetic construct
  source 1..20: mol_type = other DNA
gcatcttcggaccacaggcc

SEQ ID NO: 1929 - DNA, 21 bp, synthetic construct
  source 1..21: mol_type = other DNA
gcatcttcggaccacaggccc

SEQ ID NO: 1930 - DNA, 20 bp, synthetic construct
  source 1..20: mol_type = other DNA
catcttcggaccacaggccc

SEQ ID NO: 1931 - DNA, 21 bp, synthetic construct
  source 1..21: mol_type = other DNA
catcttcggaccacaggccct

SEQ ID NO: 1932 - DNA, 20 bp, synthetic construct
  source 1..20: mol_type = other DNA
atcttcggaccacaggccct

SEQ ID NO: 1933 - DNA, 21 bp, synthetic construct
  source 1..21: mol_type = other DNA
atcttcggaccacaggccctc

SEQ ID NO: 1934 - DNA, 20 bp, synthetic construct
  source 1..20: mol_type = other DNA
tcttcggaccacaggccctc

SEQ ID NO: 1935 - DNA, 21 bp, synthetic construct
  source 1..21: mol_type = other DNA
tcttcggaccacaggccctct

SEQ ID NO: 1936 - DNA, 20 bp, synthetic construct
  source 1..20: mol_type = other DNA
cttcggaccacaggccctct

SEQ ID NO: 1937 - DNA, 21 bp, synthetic construct
  source 1..21: mol_type = other DNA
cttcggaccacaggccctctg

SEQ ID NO: 1938 - DNA, 20 bp, synthetic construct
  source 1..20: mol_type = other DNA
ttcggaccacaggccctctg

SEQ ID NO: 1939 - DNA, 21 bp, synthetic construct
  source 1..21: mol_type = other DNA
ttcggaccacaggccctctga

SEQ ID NO: 1940 - DNA, 20 bp, synthetic construct
  source 1..20: mol_type = other DNA
tcggaccacaggccctctga

SEQ ID NO: 1941 - DNA, 21 bp, synthetic construct
  source 1..21: mol_type = other DNA
tcggaccacaggccctctgaa

SEQ ID NO: 1942 - DNA, 20 bp, synthetic construct
  source 1..20: mol_type = other DNA
cggaccacaggccctctgaa

SEQ ID NO: 1943 - DNA, 21 bp, synthetic construct
  source 1..21: mol_type = other DNA
cggaccacaggccctctgaag

SEQ ID NO: 1944 - DNA, 20 bp, synthetic construct
  source 1..20: mol_type = other DNA
ggaccacaggccctctgaag

SEQ ID NO: 1945 - DNA, 21 bp, synthetic construct
  source 1..21: mol_type = other DNA
ggaccacaggccctctgaaga

SEQ ID NO: 1946 - DNA, 20 bp, synthetic construct
  source 1..20: mol_type = other DNA
gaccacaggccctctgaaga

SEQ ID NO: 1947 - DNA, 21 bp, synthetic construct
  source 1..21: mol_type = other DNA
gaccacaggccctctgaagag

SEQ ID NO: 1948 - DNA, 20 bp, synthetic construct
  source 1..20: mol_type = other DNA
accacaggccctctgaagag

SEQ ID NO: 1949 - DNA, 21 bp, synthetic construct
  source 1..21: mol_type = other DNA
accacaggccctctgaagagg

SEQ ID NO: 1950 - DNA, 20 bp, synthetic construct
  source 1..20: mol_type = other DNA
ccacaggccctctgaagagg

SEQ ID NO: 1951 - DNA, 21 bp, synthetic construct
  source 1..21: mol_type = other DNA
ccacaggccctctgaagaggg

SEQ ID NO: 1952 - DNA, 20 bp, synthetic construct
  source 1..20: mol_type = other DNA
cacaggccctctgaagaggg

SEQ ID NO: 1953 - DNA, 21 bp, synthetic construct
  source 1..21: mol_type = other DNA
cacaggccctctgaagagggg

SEQ ID NO: 1954 - DNA, 20 bp, synthetic construct
  source 1..20: mol_type = other DNA
acaggccctctgaagagggg

SEQ ID NO: 1955 - DNA, 21 bp, synthetic construct
  source 1..21: mol_type = other DNA
acaggccctctgaagaggggc

SEQ ID NO: 1956 - DNA, 20 bp, synthetic construct
  source 1..20: mol_type = other DNA
caggccctctgaagaggggc

SEQ ID NO: 1957 - DNA, 21 bp, synthetic construct
  source 1..21: mol_type = other DNA
caggccctctgaagaggggct

SEQ ID NO: 1958 - DNA, 20 bp, synthetic construct
  source 1..20: mol_type = other DNA
aggccctctgaagaggggct

SEQ ID NO: 1959 - DNA, 21 bp, synthetic construct
  source 1..21: mol_type = other DNA
aggccctctgaagaggggctg

SEQ ID NO: 1960 - DNA, 20 bp, synthetic construct
  source 1..20: mol_type = other DNA
ggccctctgaagaggggctg

SEQ ID NO: 1961 - DNA, 21 bp, synthetic construct
  source 1..21: mol_type = other DNA
ggccctctgaagaggggctgg

SEQ ID NO: 1962 - DNA, 20 bp, synthetic construct
  source 1..20: mol_type = other DNA
gccctctgaagaggggctgg

SEQ ID NO: 1963 - DNA, 21 bp, synthetic construct
  source 1..21: mol_type = other DNA
gccctctgaagaggggctggg

SEQ ID NO: 1964 - DNA, 20 bp, synthetic construct
  source 1..20: mol_type = other DNA
ccctctgaagaggggctggg

SEQ ID NO: 1965 - DNA, 21 bp, synthetic construct
  source 1..21: mol_type = other DNA
ccctctgaagaggggctggga

SEQ ID NO: 1966 - DNA, 20 bp, synthetic construct
  source 1..20: mol_type = other DNA
cctctgaagaggggctggga

SEQ ID NO: 1967 - DNA, 21 bp, synthetic construct
  source 1..21: mol_type = other DNA
cctctgaagaggggctgggaa

SEQ ID NO: 1968 - DNA, 20 bp, synthetic construct
  source 1..20: mol_type = other DNA
ctctgaagaggggctgggaa

SEQ ID NO: 1969 - DNA, 21 bp, synthetic construct
  source 1..21: mol_type = other DNA
ctctgaagaggggctgggaaa

SEQ ID NO: 1970 - DNA, 20 bp, synthetic construct
  source 1..20: mol_type = other DNA
tctgaagaggggctgggaaa

SEQ ID NO: 1971 - DNA, 21 bp, synthetic construct
  source 1..21: mol_type = other DNA
tctgaagaggggctgggaaag

SEQ ID NO: 1972 - DNA, 20 bp, synthetic construct
  source 1..20: mol_type = other DNA
ctgaagaggggctgggaaag

SEQ ID NO: 1973 - DNA, 21 bp, synthetic construct
  source 1..21: mol_type = other DNA
ctgaagaggggctgggaaagg

SEQ ID NO: 1974 - DNA, 20 bp, synthetic construct
  source 1..20: mol_type = other DNA
tgaagaggggctgggaaagg

SEQ ID NO: 1975 - DNA, 21 bp, synthetic construct
  source 1..21: mol_type = other DNA
tgaagaggggctgggaaaggt

SEQ ID NO: 1976 - DNA, 20 bp, synthetic construct
  source 1..20: mol_type = other DNA
gaagaggggctgggaaaggt

SEQ ID NO: 1977 - DNA, 21 bp, synthetic construct
  source 1..21: mol_type = other DNA
gaagaggggctgggaaaggtt

SEQ ID NO: 1978 - DNA, 20 bp, synthetic construct
  source 1..20: mol_type = other DNA
aagaggggctgggaaaggtt

SEQ ID NO: 1979 - DNA, 21 bp, synthetic construct
  source 1..21: mol_type = other DNA
aagaggggctgggaaaggttg

SEQ ID NO: 1980 - DNA, 20 bp, synthetic construct
  source 1..20: mol_type = other DNA
agaggggctgggaaaggttg

SEQ ID NO: 1981 - DNA, 21 bp, synthetic construct
  source 1..21: mol_type = other DNA
agaggggctgggaaaggttgg

SEQ ID NO: 1982 - DNA, 20 bp, synthetic construct
  source 1..20: mol_type = other DNA
gaggggctgggaaaggttgg

SEQ ID NO: 1983 - DNA, 21 bp, synthetic construct
  source 1..21: mol_type = other DNA
gaggggctgggaaaggttggc

SEQ ID NO: 1984 - DNA, 20 bp, synthetic construct
  source 1..20: mol_type = other DNA
aggggctgggaaaggttggc

SEQ ID NO: 1985 - DNA, 21 bp, synthetic construct
  source 1..21: mol_type = other DNA
aggggctgggaaaggttggct

SEQ ID NO: 1986 - DNA, 20 bp, synthetic construct
  source 1..20: mol_type = other DNA
ggggctgggaaaggttggct

SEQ ID NO: 1987 - DNA, 21 bp, synthetic construct
  source 1..21: mol_type = other DNA
ggggctgggaaaggttggctg

SEQ ID NO: 1988 - DNA, 20 bp, synthetic construct
  source 1..20: mol_type = other DNA
gggctgggaaaggttggctg

SEQ ID NO: 1989 - DNA, 21 bp, synthetic construct
  source 1..21: mol_type = other DNA
gggctgggaaaggttggctgt

SEQ ID NO: 1990 - DNA, 20 bp, synthetic construct
  source 1..20: mol_type = other DNA
ggctgggaaaggttggctgt

SEQ ID NO: 1991 - DNA, 21 bp, synthetic construct
  source 1..21: mol_type = other DNA
ggctgggaaaggttggctgtg

SEQ ID NO: 1992 - DNA, 20 bp, synthetic construct
  source 1..20: mol_type = other DNA
gctgggaaaggttggctgtg

SEQ ID NO: 1993 - DNA, 21 bp, synthetic construct
  source 1..21: mol_type = other DNA
gctgggaaaggttggctgtgt

SEQ ID NO: 1994 - DNA, 20 bp, synthetic construct
  source 1..20: mol_type = other DNA
ctgggaaaggttggctgtgt

SEQ ID NO: 1995 - DNA, 21 bp, synthetic construct
  source 1..21: mol_type = other DNA
ctgggaaaggttggctgtgtc

SEQ ID NO: 1996 - DNA, 20 bp, synthetic construct
  source 1..20: mol_type = other DNA
tgggaaaggttggctgtgtc

SEQ ID NO: 1997 - DNA, 21 bp, synthetic construct
  source 1..21: mol_type = other DNA
tgggaaaggttggctgtgtcc

SEQ ID NO: 1998 - DNA, 20 bp, synthetic construct
  source 1..20: mol_type = other DNA
gggaaaggttggctgtgtcc

SEQ ID NO: 1999 - DNA, 21 bp, synthetic construct
  source 1..21: mol_type = other DNA
gggaaaggttggctgtgtccc

SEQ ID NO: 2000 - DNA, 20 bp, synthetic construct
  source 1..20: mol_type = other DNA
ggaaaggttggctgtgtccc

SEQ ID NO: 2001 - DNA, 21 bp, synthetic construct
  source 1..21: mol_type = other DNA
ggaaaggttggctgtgtccct

SEQ ID NO: 2002 - DNA, 20 bp, synthetic construct
  source 1..20: mol_type = other DNA
gaaaggttggctgtgtccct

SEQ ID NO: 2003 - DNA, 21 bp, synthetic construct
  source 1..21: mol_type = other DNA
gaaaggttggctgtgtccctt

SEQ ID NO: 2004 - DNA, 20 bp, synthetic construct
  source 1..20: mol_type = other DNA
aaaggttggctgtgtccctt

SEQ ID NO: 2005 - DNA, 21 bp, synthetic construct
  source 1..21: mol_type = other DNA
aaaggttggctgtgtcccttc

SEQ ID NO: 2006 - DNA, 20 bp, synthetic construct
  source 1..20: mol_type = other DNA
aaggttggctgtgtcccttc

SEQ ID NO: 2007 - DNA, 21 bp, synthetic construct
  source 1..21: mol_type = other DNA
aaggttggctgtgtcccttcc

SEQ ID NO: 2008 - DNA, 20 bp, synthetic construct
  source 1..20: mol_type = other DNA
aggttggctgtgtcccttcc

SEQ ID NO: 2009 - DNA, 21 bp, synthetic construct
  source 1..21: mol_type = other DNA
aggttggctgtgtcccttccc

SEQ ID NO: 2010 - DNA, 20 bp, synthetic construct
  source 1..20: mol_type = other DNA
ggttggctgtgtcccttccc

SEQ ID NO: 2011 - DNA, 21 bp, synthetic construct
  source 1..21: mol_type = other DNA
ggttggctgtgtcccttcccc

SEQ ID NO: 2012 - DNA, 20 bp, synthetic construct
  source 1..20: mol_type = other DNA
gttggctgtgtcccttcccc

SEQ ID NO: 2013 - DNA, 21 bp, synthetic construct
  source 1..21: mol_type = other DNA
gttggctgtgtcccttccccg

SEQ ID NO: 2014 - DNA, 20 bp, synthetic construct
  source 1..20: mol_type = other DNA
ttggctgtgtcccttccccg

SEQ ID NO: 2015 - DNA, 21 bp, synthetic construct
  source 1..21: mol_type = other DNA
ttggctgtgtcccttccccgc

SEQ ID NO: 2016 - DNA, 20 bp, synthetic construct
  source 1..20: mol_type = other DNA
tggctgtgtcccttccccgc

SEQ ID NO: 2017 - DNA, 21 bp, synthetic construct
  source 1..21: mol_type = other DNA
tggctgtgtcccttccccgct

SEQ ID NO: 2018 - DNA, 20 bp, synthetic construct
  source 1..20: mol_type = other DNA
ggctgtgtcccttccccgct

SEQ ID NO: 2019 - DNA, 21 bp, synthetic construct
  source 1..21: mol_type = other DNA
ggctgtgtcccttccccgctg

SEQ ID NO: 2020 - DNA, 20 bp, synthetic construct
  source 1..20: mol_type = other DNA
gctgtgtcccttccccgctg

SEQ ID NO: 2021 - DNA, 21 bp, synthetic construct
  source 1..21: mol_type = other DNA
gctgtgtcccttccccgctgg

SEQ ID NO: 2022 - DNA, 20 bp, synthetic construct
  source 1..20: mol_type = other DNA
ctgtgtcccttccccgctgg

SEQ ID NO: 2023 - DNA, 21 bp, synthetic construct
  source 1..21: mol_type = other DNA
ctgtgtcccttccccgctggc

SEQ ID NO: 2024 - DNA, 20 bp, synthetic construct
  source 1..20: mol_type = other DNA
tgtgtcccttccccgctggc

SEQ ID NO: 2025 - DNA, 21 bp, synthetic construct
  source 1..21: mol_type = other DNA
tgtgtcccttccccgctggcc

SEQ ID NO: 2026 - DNA, 20 bp, synthetic construct
  source 1..20: mol_type = other DNA
gtgtcccttccccgctggcc

SEQ ID NO: 2027 - DNA, 21 bp, synthetic construct
  source 1..21: mol_type = other DNA
gtgtcccttccccgctggcca

SEQ ID NO: 2028 - DNA, 20 bp, synthetic construct
  source 1..20: mol_type = other DNA
tgtcccttccccgctggcca

SEQ ID NO: 2029 - DNA, 21 bp, synthetic construct
  source 1..21: mol_type = other DNA
tgtcccttccccgctggccag

SEQ ID NO: 2030 - DNA, 20 bp, synthetic construct
  source 1..20: mol_type = other DNA
gtcccttccccgctggccag

SEQ ID NO: 2031 - DNA, 21 bp, synthetic construct
  source 1..21: mol_type = other DNA
gtcccttccccgctggccagc

SEQ ID NO: 2032 - DNA, 20 bp, synthetic construct
  source 1..20: mol_type = other DNA
tcccttccccgctggccagc

SEQ ID NO: 2033 - DNA, 21 bp, synthetic construct
  source 1..21: mol_type = other DNA
tcccttccccgctggccagca

SEQ ID NO: 2034 - DNA, 20 bp, synthetic construct
  source 1..20: mol_type = other DNA
cccttccccgctggccagca

SEQ ID NO: 2035 - DNA, 21 bp, synthetic construct
  source 1..21: mol_type = other DNA
cccttccccgctggccagcaa

SEQ ID NO: 2036 - DNA, 20 bp, synthetic construct
  source 1..20: mol_type = other DNA
ccttccccgctggccagcaa

SEQ ID NO: 2037 - DNA, 21 bp, synthetic construct
  source 1..21: mol_type = other DNA
ccttccccgctggccagcaaa

SEQ ID NO: 2038 - DNA, 20 bp, synthetic construct
  source 1..20: mol_type = other DNA
cttccccgctggccagcaaa

SEQ ID NO: 2039 - DNA, 21 bp, synthetic construct
  source 1..21: mol_type = other DNA
cttccccgctggccagcaaat

SEQ ID NO: 2040 - DNA, 20 bp, synthetic construct
  source 1..20: mol_type = other DNA
ttccccgctggccagcaaat

SEQ ID NO: 2041 - DNA, 21 bp, synthetic construct
  source 1..21: mol_type = other DNA
ttccccgctggccagcaaatg

SEQ ID NO: 2042 - DNA, 20 bp, synthetic construct
  source 1..20: mol_type = other DNA
tccccgctggccagcaaatg

SEQ ID NO: 2043 - DNA, 21 bp, synthetic construct
  source 1..21: mol_type = other DNA
tccccgctggccagcaaatgg

SEQ ID NO: 2044 - DNA, 20 bp, synthetic construct
  source 1..20: mol_type = other DNA
ccccgctggccagcaaatgg

SEQ ID NO: 2045 - DNA, 21 bp, synthetic construct
  source 1..21: mol_type = other DNA
ccccgctggccagcaaatggt

SEQ ID NO: 2046 - DNA, 20 bp, synthetic construct
  source 1..20: mol_type = other DNA
cccgctggccagcaaatggt

SEQ ID NO: 2047 - DNA, 21 bp, synthetic construct
  source 1..21: mol_type = other DNA
cccgctggccagcaaatggtt

SEQ ID NO: 2048 - DNA, 20 bp, synthetic construct
  source 1..20: mol_type = other DNA
ccgctggccagcaaatggtt

SEQ ID NO: 2049 - DNA, 21 bp, synthetic construct
  source 1..21: mol_type = other DNA
ccgctggccagcaaatggttt

SEQ ID NO: 2050 - DNA, 20 bp, synthetic construct
  source 1..20: mol_type = other DNA
cgctggccagcaaatggttt

SEQ ID NO: 2051 - DNA, 21 bp, synthetic construct
  source 1..21: mol_type = other DNA
cgctggccagcaaatggtttg

SEQ ID NO: 2052 - DNA, 20 bp, synthetic construct
  source 1..20: mol_type = other DNA
gctggccagcaaatggtttg

SEQ ID NO: 2053 - DNA, 21 bp, synthetic construct
  source 1..21: mol_type = other DNA
gctggccagcaaatggtttga

SEQ ID NO: 2054 - DNA, 20 bp, synthetic construct
  source 1..20: mol_type = other DNA
ctggccagcaaatggtttga

SEQ ID NO: 2055 - DNA, 21 bp, synthetic construct
  source 1..21: mol_type = other DNA
ctggccagcaaatggtttgat

SEQ ID NO: 2056 - DNA, 20 bp, synthetic construct
  source 1..20: mol_type = other DNA
tggccagcaaatggtttgat

SEQ ID NO: 2057 - DNA, 21 bp, synthetic construct
  source 1..21: mol_type = other DNA
tggccagcaaatggtttgatt

SEQ ID NO: 2058 - DNA, 20 bp, synthetic construct
  source 1..20: mol_type = other DNA
ggccagcaaatggtttgatt

SEQ ID NO: 2059 - DNA, 21 bp, synthetic construct
  source 1..21: mol_type = other DNA
ggccagcaaatggtttgattg

SEQ ID NO: 2060 - DNA, 20 bp, synthetic construct
  source 1..20: mol_type = other DNA
gccagcaaatggtttgattg

SEQ ID NO: 2061 - DNA, 21 bp, synthetic construct
  source 1..21: mol_type = other DNA
gccagcaaatggtttgattgc

SEQ ID NO: 2062 - DNA, 20 bp, synthetic construct
  source 1..20: mol_type = other DNA
ccagcaaatggtttgattgc

SEQ ID NO: 2063 - DNA, 21 bp, synthetic construct
  source 1..21: mol_type = other DNA
ccagcaaatggtttgattgca

SEQ ID NO: 2064 - DNA, 20 bp, synthetic construct
  source 1..20: mol_type = other DNA
cagcaaatggtttgattgca

SEQ ID NO: 2065 - DNA, 21 bp, synthetic construct
  source 1..21: mol_type = other DNA
cagcaaatggtttgattgcac

SEQ ID NO: 2066 - DNA, 20 bp, synthetic construct
  source 1..20: mol_type = other DNA
agcaaatggtttgattgcac

SEQ ID NO: 2067 - DNA, 21 bp, synthetic construct
  source 1..21: mol_type = other DNA
agcaaatggtttgattgcaca

SEQ ID NO: 2068 - DNA, 20 bp, synthetic construct
  source 1..20: mol_type = other DNA
gcaaatggtttgattgcaca

SEQ ID NO: 2069 - DNA, 21 bp, synthetic construct
  source 1..21: mol_type = other DNA
gcaaatggtttgattgcacat

SEQ ID NO: 2070 - DNA, 20 bp, synthetic construct
  source 1..20: mol_type = other DNA
caaatggtttgattgcacat

SEQ ID NO: 2071 - DNA, 21 bp, synthetic construct
  source 1..21: mol_type = other DNA
caaatggtttgattgcacatt

SEQ ID NO: 2072 - DNA, 20 bp, synthetic construct
  source 1..20: mol_type = other DNA
aaatggtttgattgcacatt

SEQ ID NO: 2073 - DNA, 21 bp, synthetic construct
  source 1..21: mol_type = other DNA
aaatggtttgattgcacatta

SEQ ID NO: 2074 - DNA, 20 bp, synthetic construct
  source 1..20: mol_type = other DNA
aatggtttgattgcacatta

SEQ ID NO: 2075 - DNA, 21 bp, synthetic construct
  source 1..21: mol_type = other DNA
aatggtttgattgcacattat

SEQ ID NO: 2076 - DNA, 20 bp, synthetic construct
  source 1..20: mol_type = other DNA
atggtttgattgcacattat

SEQ ID NO: 2077 - DNA, 21 bp, synthetic construct
  source 1..21: mol_type = other DNA
atggtttgattgcacattatc

SEQ ID NO: 2078 - DNA, 20 bp, synthetic construct
  source 1..20: mol_type = other DNA
tggtttgattgcacattatc

SEQ ID NO: 2079 - DNA, 21 bp, synthetic construct
  source 1..21: mol_type = other DNA
tggtttgattgcacattatca

SEQ ID NO: 2080 - DNA, 20 bp, synthetic construct
  source 1..20: mol_type = other DNA
ggtttgattgcacattatca

SEQ ID NO: 2081 - DNA, 21 bp, synthetic construct
  source 1..21: mol_type = other DNA
ggtttgattgcacattatcag

SEQ ID NO: 2082 - DNA, 20 bp, synthetic construct
  source 1..20: mol_type = other DNA
gtttgattgcacattatcag

SEQ ID NO: 2083 - DNA, 21 bp, synthetic construct
  source 1..21: mol_type = other DNA
gtttgattgcacattatcagg

SEQ ID NO: 2084 - DNA, 20 bp, synthetic construct
  source 1..20: mol_type = other DNA
tttgattgcacattatcagg

SEQ ID NO: 2085 - DNA, 21 bp, synthetic construct
  source 1..21: mol_type = other DNA
tttgattgcacattatcagga

SEQ ID NO: 2086 - DNA, 20 bp, synthetic construct
  source 1..20: mol_type = other DNA
ttgattgcacattatcagga

SEQ ID NO: 2087 - DNA, 21 bp, synthetic construct
  source 1..21: mol_type = other DNA
ttgattgcacattatcaggat

SEQ ID NO: 2088 - DNA, 20 bp, synthetic construct
  source 1..20: mol_type = other DNA
tgattgcacattatcaggat

SEQ ID NO: 2089 - DNA, 21 bp, synthetic construct
  source 1..21: mol_type = other DNA
tgattgcacattatcaggatc

SEQ ID NO: 2090 - DNA, 20 bp, synthetic construct
  source 1..20: mol_type = other DNA
gattgcacattatcaggatc

SEQ ID NO: 2091 - DNA, 21 bp, synthetic construct
  source 1..21: mol_type = other DNA
gattgcacattatcaggatcc

SEQ ID NO: 2092 - DNA, 20 bp, synthetic construct
  source 1..20: mol_type = other DNA
attgcacattatcaggatcc

SEQ ID NO: 2093 - DNA, 21 bp, synthetic construct
  source 1..21: mol_type = other DNA
attgcacattatcaggatcct

SEQ ID NO: 2094 - DNA, 20 bp, synthetic construct
  source 1..20: mol_type = other DNA
ttgcacattatcaggatcct

SEQ ID NO: 2095 - DNA, 21 bp, synthetic construct
  source 1..21: mol_type = other DNA
ttgcacattatcaggatcctc

SEQ ID NO: 2096 - DNA, 20 bp, synthetic construct
  source 1..20: mol_type = other DNA
tgcacattatcaggatcctc

SEQ ID NO: 2097 - DNA, 21 bp, synthetic construct
  source 1..21: mol_type = other DNA
tgcacattatcaggatcctct

SEQ ID NO: 2098 - DNA, 20 bp, synthetic construct
  source 1..20: mol_type = other DNA
gcacattatcaggatcctct

SEQ ID NO: 2099 - DNA, 21 bp, synthetic construct
  source 1..21: mol_type = other DNA
gcacattatcaggatcctctg

SEQ ID NO: 2100 - DNA, 20 bp, synthetic construct
  source 1..20: mol_type = other DNA
cacattatcaggatcctctg

SEQ ID NO: 2101 - DNA, 21 bp, synthetic construct
  source 1..21: mol_type = other DNA
cacattatcaggatcctctgg

SEQ ID NO: 2102 - DNA, 20 bp, synthetic construct
  source 1..20: mol_type = other DNA
acattatcaggatcctctgg

SEQ ID NO: 2103 - DNA, 21 bp, synthetic construct
  source 1..21: mol_type = other DNA
acattatcaggatcctctggg

SEQ ID NO: 2104 - DNA, 20 bp, synthetic construct
  source 1..20: mol_type = other DNA
cattatcaggatcctctggg

SEQ ID NO: 2105 - DNA, 21 bp, synthetic construct
  source 1..21: mol_type = other DNA
cattatcaggatcctctgggt

SEQ ID NO: 2106 - DNA, 20 bp, synthetic construct
  source 1..20: mol_type = other DNA
attatcaggatcctctgggt

SEQ ID NO: 2107 - DNA, 21 bp, synthetic construct
  source 1..21: mol_type = other DNA
attatcaggatcctctgggtc

SEQ ID NO: 2108 - DNA, 20 bp, synthetic construct
  source 1..20: mol_type = other DNA
ttatcaggatcctctgggtc

SEQ ID NO: 2109 - DNA, 21 bp, synthetic construct
  source 1..21: mol_type = other DNA
ttatcaggatcctctgggtca

SEQ ID NO: 2110 - DNA, 20 bp, synthetic construct
  source 1..20: mol_type = other DNA
tatcaggatcctctgggtca

SEQ ID NO: 2111 - DNA, 21 bp, synthetic construct
  source 1..21: mol_type = other DNA
tatcaggatcctctgggtcaa

SEQ ID NO: 2112 - DNA, 20 bp, synthetic construct
  source 1..20: mol_type = other DNA
atcaggatcctctgggtcaa

SEQ ID NO: 2113 - DNA, 21 bp, synthetic construct
  source 1..21: mol_type = other DNA
atcaggatcctctgggtcaac

SEQ ID NO: 2114 - DNA, 20 bp, synthetic construct
  source 1..20: mol_type = other DNA
tcaggatcctctgggtcaac

SEQ ID NO: 2115 - DNA, 21 bp, synthetic construct
  source 1..21: mol_type = other DNA
tcaggatcctctgggtcaacc

SEQ ID NO: 2116 - DNA, 20 bp, synthetic construct
  source 1..20: mol_type = other DNA
caggatcctctgggtcaacc

SEQ ID NO: 2117 - DNA, 21 bp, synthetic construct
  source 1..21: mol_type = other DNA
caggatcctctgggtcaacca

SEQ ID NO: 2118 - DNA, 20 bp, synthetic construct
  source 1..20: mol_type = other DNA
aggatcctctgggtcaacca

SEQ ID NO: 2119 - DNA, 21 bp, synthetic construct
  source 1..21: mol_type = other DNA
aggatcctctgggtcaaccat

SEQ ID NO: 2120 - DNA, 20 bp, synthetic construct
  source 1..20: mol_type = other DNA
ggatcctctgggtcaaccat

SEQ ID NO: 2121 - DNA, 21 bp, synthetic construct
  source 1..21: mol_type = other DNA
ggatcctctgggtcaaccatc

SEQ ID NO: 2122 - DNA, 20 bp, synthetic construct
  source 1..20: mol_type = other DNA
gatcctctgggtcaaccatc

SEQ ID NO: 2123 - DNA, 21 bp, synthetic construct
  source 1..21: mol_type = other DNA
gatcctctgggtcaaccatct

SEQ ID NO: 2124 - DNA, 20 bp, synthetic construct
  source 1..20: mol_type = other DNA
atcctctgggtcaaccatct

SEQ ID NO: 2125 - DNA, 21 bp, synthetic construct
  source 1..21: mol_type = other DNA
atcctctgggtcaaccatctc

SEQ ID NO: 2126 - DNA, 20 bp, synthetic construct
  source 1..20: mol_type = other DNA
tcctctgggtcaaccatctc

SEQ ID NO: 2127 - DNA, 21 bp, synthetic construct
  source 1..21: mol_type = other DNA
tcctctgggtcaaccatctct

SEQ ID NO: 2128 - DNA, 20 bp, synthetic construct
  source 1..20: mol_type = other DNA
cctctgggtcaaccatctct

SEQ ID NO: 2129 - DNA, 21 bp, synthetic construct
  source 1..21: mol_type = other DNA
cctctgggtcaaccatctctt

SEQ ID NO: 2130 - DNA, 20 bp, synthetic construct
  source 1..20: mol_type = other DNA
ctctgggtcaaccatctctt

SEQ ID NO: 2131 - DNA, 21 bp, synthetic construct
  source 1..21: mol_type = other DNA
ctctgggtcaaccatctcttc

SEQ ID NO: 2132 - DNA, 20 bp, synthetic construct
  source 1..20: mol_type = other DNA
tctgggtcaaccatctcttc

SEQ ID NO: 2133 - DNA, 21 bp, synthetic construct
  source 1..21: mol_type = other DNA
tctgggtcaaccatctcttcc

SEQ ID NO: 2134 - DNA, 20 bp, synthetic construct
  source 1..20: mol_type = other DNA
ctgggtcaaccatctcttcc

SEQ ID NO: 2135 - DNA, 21 bp, synthetic construct
  source 1..21: mol_type = other DNA
ctgggtcaaccatctcttcca

SEQ ID NO: 2136 - DNA, 20 bp, synthetic construct
  source 1..20: mol_type = other DNA
tgggtcaaccatctcttcca

SEQ ID NO: 2137 - DNA, 21 bp, synthetic construct
  source 1..21: mol_type = other DNA
tgggtcaaccatctcttccag

SEQ ID NO: 2138 - DNA, 20 bp, synthetic construct
  source 1..20: mol_type = other DNA
gggtcaaccatctcttccag

SEQ ID NO: 2139 - DNA, 21 bp, synthetic construct
  source 1..21: mol_type = other DNA
gggtcaaccatctcttccaga

SEQ ID NO: 2140 - DNA, 20 bp, synthetic construct
  source 1..20: mol_type = other DNA
ggtcaaccatctcttccaga

SEQ ID NO: 2141 - DNA, 21 bp, synthetic construct
  source 1..21: mol_type = other DNA
ggtcaaccatctcttccagat

SEQ ID NO: 2142 - DNA, 20 bp, synthetic construct
  source 1..20: mol_type = other DNA
gtcaaccatctcttccagat

SEQ ID NO: 2143 - DNA, 21 bp, synthetic construct
  source 1..21: mol_type = other DNA
gtcaaccatctcttccagatg

SEQ ID NO: 2144 - DNA, 20 bp, synthetic construct
  source 1..20: mol_type = other DNA
tcaaccatctcttccagatg

SEQ ID NO: 2145 - DNA, 21 bp, synthetic construct
  source 1..21: mol_type = other DNA
tcaaccatctcttccagatga

SEQ ID NO: 2146 - DNA, 20 bp, synthetic construct
  source 1..20: mol_type = other DNA
caaccatctcttccagatga

SEQ ID NO: 2147 - DNA, 21 bp, synthetic construct
  source 1..21: mol_type = other DNA
caaccatctcttccagatgag

SEQ ID NO: 2148 - DNA, 20 bp, synthetic construct
  source 1..20: mol_type = other DNA
aaccatctcttccagatgag

SEQ ID NO: 2149 - DNA, 21 bp, synthetic construct
  source 1..21: mol_type = other DNA
aaccatctcttccagatgaga

SEQ ID NO: 2150 - DNA, 20 bp, synthetic construct
  source 1..20: mol_type = other DNA
accatctcttccagatgaga

SEQ ID NO: 2151 - DNA, 21 bp, synthetic construct
  source 1..21: mol_type = other DNA
accatctcttccagatgagac

SEQ ID NO: 2152 - DNA, 20 bp, synthetic construct
  source 1..20: mol_type = other DNA
ccatctcttccagatgagac

SEQ ID NO: 2153 - DNA, 21 bp, synthetic construct
  source 1..21: mol_type = other DNA
ccatctcttccagatgagacg

SEQ ID NO: 2154 - DNA, 20 bp, synthetic construct
  source 1..20: mol_type = other DNA
catctcttccagatgagacg

SEQ ID NO: 2155 - DNA, 21 bp, synthetic construct
  source 1..21: mol_type = other DNA
catctcttccagatgagacga

SEQ ID NO: 2156 - DNA, 20 bp, synthetic construct
  source 1..20: mol_type = other DNA
atctcttccagatgagacga

SEQ ID NO: 2157 - DNA, 21 bp, synthetic construct
  source 1..21: mol_type = other DNA
atctcttccagatgagacgat

SEQ ID NO: 2158 - DNA, 20 bp, synthetic construct
  source 1..20: mol_type = other DNA
tctcttccagatgagacgat

SEQ ID NO: 2159 - DNA, 21 bp, synthetic construct
  source 1..21: mol_type = other DNA
tctcttccagatgagacgata

SEQ ID NO: 2160 - DNA, 20 bp, synthetic construct
  source 1..20: mol_type = other DNA
ctcttccagatgagacgata

SEQ ID NO: 2161 - DNA, 21 bp, synthetic construct
  source 1..21: mol_type = other DNA
ctcttccagatgagacgatag

SEQ ID NO: 2162 - DNA, 20 bp, synthetic construct
  source 1..20: mol_type = other DNA
tcttccagatgagacgatag

SEQ ID NO: 2163 - DNA, 21 bp, synthetic construct
  source 1..21: mol_type = other DNA
tcttccagatgagacgatagc

SEQ ID NO: 2164 - DNA, 20 bp, synthetic construct
  source 1..20: mol_type = other DNA
cttccagatgagacgatagc

SEQ ID NO: 2165 - DNA, 21 bp, synthetic construct
  source 1..21: mol_type = other DNA
cttccagatgagacgatagca

SEQ ID NO: 2166 - DNA, 20 bp, synthetic construct
  source 1..20: mol_type = other DNA
ttccagatgagacgatagca

SEQ ID NO: 2167 - DNA, 21 bp, synthetic construct
  source 1..21: mol_type = other DNA
ttccagatgagacgatagcat

SEQ ID NO: 2168 - DNA, 20 bp, synthetic construct
  source 1..20: mol_type = other DNA
tccagatgagacgatagcat

SEQ ID NO: 2169 - DNA, 21 bp, synthetic construct
  source 1..21: mol_type = other DNA
tccagatgagacgatagcatc

SEQ ID NO: 2170 - DNA, 20 bp, synthetic construct
  source 1..20: mol_type = other DNA
ccagatgagacgatagcatc

SEQ ID NO: 2171 - DNA, 21 bp, synthetic construct
  source 1..21: mol_type = other DNA
ccagatgagacgatagcatca

SEQ ID NO: 2172 - DNA, 20 bp, synthetic construct
  source 1..20: mol_type = other DNA
cagatgagacgatagcatca

SEQ ID NO: 2173 - DNA, 21 bp, synthetic construct
  source 1..21: mol_type = other DNA
cagatgagacgatagcatcag

SEQ ID NO: 2174 - DNA, 20 bp, synthetic construct
  source 1..20: mol_type = other DNA
agatgagacgatagcatcag

SEQ ID NO: 2175 - DNA, 21 bp, synthetic construct
  source 1..21: mol_type = other DNA
agatgagacgatagcatcaga

SEQ ID NO: 2176 - DNA, 20 bp, synthetic construct
  source 1..20: mol_type = other DNA
gatgagacgatagcatcaga

SEQ ID NO: 2177 - DNA, 21 bp, synthetic construct
  source 1..21: mol_type = other DNA
gatgagacgatagcatcagag

SEQ ID NO: 2178 - DNA, 20 bp, synthetic construct
  source 1..20: mol_type = other DNA
atgagacgatagcatcagag

SEQ ID NO: 2179 - DNA, 21 bp, synthetic construct
  source 1..21: mol_type = other DNA
atgagacgatagcatcagagg

SEQ ID NO: 2180 - DNA, 20 bp, synthetic construct
  source 1..20: mol_type = other DNA
tgagacgatagcatcagagg

SEQ ID NO: 2181 - DNA, 21 bp, synthetic construct
  source 1..21: mol_type = other DNA
tgagacgatagcatcagaggg

SEQ ID NO: 2182 - DNA, 20 bp, synthetic construct
  source 1..20: mol_type = other DNA
gagacgatagcatcagaggg

SEQ ID NO: 2183 - DNA, 21 bp, synthetic construct
  source 1..21: mol_type = other DNA
gagacgatagcatcagagggg

SEQ ID NO: 2184 - DNA, 20 bp, synthetic construct
  source 1..20: mol_type = other DNA
agacgatagcatcagagggg

SEQ ID NO: 2185 - DNA, 21 bp, synthetic construct
  source 1..21: mol_type = other DNA
agacgatagcatcagaggggc

SEQ ID NO: 2186 - DNA, 20 bp, synthetic construct
  source 1..20: mol_type = other DNA
gacgatagcatcagaggggc

SEQ ID NO: 2187 - DNA, 21 bp, synthetic construct
  source 1..21: mol_type = other DNA
gacgatagcatcagaggggct

SEQ ID NO: 2188 - DNA, 20 bp, synthetic construct
  source 1..20: mol_type = other DNA
acgatagcatcagaggggct

SEQ ID NO: 2189 - DNA, 21 bp, synthetic construct
  source 1..21: mol_type = other DNA
acgatagcatcagaggggctt

SEQ ID NO: 2190 - DNA, 20 bp, synthetic construct
  source 1..20: mol_type = other DNA
cgatagcatcagaggggctt

SEQ ID NO: 2191 - DNA, 21 bp, synthetic construct
  source 1..21: mol_type = other DNA
cgatagcatcagaggggcttc

SEQ ID NO: 2192 - DNA, 20 bp, synthetic construct
  source 1..20: mol_type = other DNA
gatagcatcagaggggcttc

SEQ ID NO: 2193 - DNA, 21 bp, synthetic construct
  source 1..21: mol_type = other DNA
gatagcatcagaggggcttct

SEQ ID NO: 2194 - DNA, 20 bp, synthetic construct
  source 1..20: mol_type = other DNA
atagcatcagaggggcttct

SEQ ID NO: 2195 - DNA, 21 bp, synthetic construct
  source 1..21: mol_type = other DNA
atagcatcagaggggcttcta

SEQ ID NO: 2196 - DNA, 20 bp, synthetic construct
  source 1..20: mol_type = other DNA
tagcatcagaggggcttcta

SEQ ID NO: 2197 - DNA, 21 bp, synthetic construct
  source 1..21: mol_type = other DNA
tagcatcagaggggcttctaa

SEQ ID NO: 2198 - DNA, 20 bp, synthetic construct
  source 1..20: mol_type = other DNA
agcatcagaggggcttctaa

SEQ ID NO: 2199 - DNA, 21 bp, synthetic construct
  source 1..21: mol_type = other DNA
agcatcagaggggcttctaag

SEQ ID NO: 2200 - DNA, 20 bp, synthetic construct
  source 1..20: mol_type = other DNA
gcatcagaggggcttctaag

SEQ ID NO: 2201 - DNA, 21 bp, synthetic construct
  source 1..21: mol_type = other DNA
gcatcagaggggcttctaagt

SEQ ID NO: 2202 - DNA, 20 bp, synthetic construct
  source 1..20: mol_type = other DNA
catcagaggggcttctaagt

SEQ ID NO: 2203 - DNA, 21 bp, synthetic construct
  source 1..21: mol_type = other DNA
catcagaggggcttctaagtc

SEQ ID NO: 2204 - DNA, 20 bp, synthetic construct
  source 1..20: mol_type = other DNA
atcagaggggcttctaagtc

SEQ ID NO: 2205 - DNA, 21 bp, synthetic construct
  source 1..21: mol_type = other DNA
atcagaggggcttctaagtcg

SEQ ID NO: 2206 - DNA, 20 bp, synthetic construct
  source 1..20: mol_type = other DNA
tcagaggggcttctaagtcg

SEQ ID NO: 2207 - DNA, 21 bp, synthetic construct
  source 1..21: mol_type = other DNA
tcagaggggcttctaagtcgt

SEQ ID NO: 2208 - DNA, 20 bp, synthetic construct
  source 1..20: mol_type = other DNA
cagaggggcttctaagtcgt

SEQ ID NO: 2209 - DNA, 21 bp, synthetic construct
  source 1..21: mol_type = other DNA
cagaggggcttctaagtcgtc

SEQ ID NO: 2210 - DNA, 20 bp, synthetic construct
  source 1..20: mol_type = other DNA
agaggggcttctaagtcgtc

SEQ ID NO: 2211 - DNA, 21 bp, synthetic construct
  source 1..21: mol_type = other DNA
agaggggcttctaagtcgtca

SEQ ID NO: 2212 - DNA, 20 bp, synthetic construct
  source 1..20: mol_type = other DNA
gaggggcttctaagtcgtca

SEQ ID NO: 2213 - DNA, 21 bp, synthetic construct
  source 1..21: mol_type = other DNA
gaggggcttctaagtcgtcac

SEQ ID NO: 2214 - DNA, 20 bp, synthetic construct
  source 1..20: mol_type = other DNA
aggggcttctaagtcgtcac

SEQ ID NO: 2215 - DNA, 21 bp, synthetic construct
  source 1..21: mol_type = other DNA
aggggcttctaagtcgtcact

SEQ ID NO: 2216 - DNA, 20 bp, synthetic construct
  source 1..20: mol_type = other DNA
ggggcttctaagtcgtcact

SEQ ID NO: 2217 - DNA, 21 bp, synthetic construct
  source 1..21: mol_type = other DNA
ggggcttctaagtcgtcactg

SEQ ID NO: 2218 - DNA, 20 bp, synthetic construct
  source 1..20: mol_type = other DNA
gggcttctaagtcgtcactg

SEQ ID NO: 2219 - DNA, 21 bp, synthetic construct
  source 1..21: mol_type = other DNA
gggcttctaagtcgtcactgt

SEQ ID NO: 2220 - DNA, 20 bp, synthetic construct
  source 1..20: mol_type = other DNA
ggcttctaagtcgtcactgt

SEQ ID NO: 2221 - DNA, 21 bp, synthetic construct
  source 1..21: mol_type = other DNA
ggcttctaagtcgtcactgtc

SEQ ID NO: 2222 - DNA, 20 bp, synthetic construct
  source 1..20: mol_type = other DNA
gcttctaagtcgtcactgtc

SEQ ID NO: 2223 - DNA, 21 bp, synthetic construct
  source 1..21: mol_type = other DNA
gcttctaagtcgtcactgtcc

SEQ ID NO: 2224 - DNA, 20 bp, synthetic construct
  source 1..20: mol_type = other DNA
cttctaagtcgtcactgtcc

SEQ ID NO: 2225 - DNA, 21 bp, synthetic construct
  source 1..21: mol_type = other DNA
cttctaagtcgtcactgtcct

SEQ ID NO: 2226 - DNA, 20 bp, synthetic construct
  source 1..20: mol_type = other DNA
ttctaagtcgtcactgtcct

SEQ ID NO: 2227 - DNA, 21 bp, synthetic construct
  source 1..21: mol_type = other DNA
ttctaagtcgtcactgtcctc

SEQ ID NO: 2228 - DNA, 20 bp, synthetic construct
  source 1..20: mol_type = other DNA
tctaagtcgtcactgtcctc

SEQ ID NO: 2229 - DNA, 21 bp, synthetic construct
  source 1..21: mol_type = other DNA
tctaagtcgtcactgtcctcg

SEQ ID NO: 2230 - DNA, 20 bp, synthetic construct
  source 1..20: mol_type = other DNA
ctaagtcgtcactgtcctcg

SEQ ID NO: 2231 - DNA, 21 bp, synthetic construct
  source 1..21: mol_type = other DNA
ctaagtcgtcactgtcctcgt

SEQ ID NO: 2232 - DNA, 20 bp, synthetic construct
  source 1..20: mol_type = other DNA
taagtcgtcactgtcctcgt

SEQ ID NO: 2233 - DNA, 21 bp, synthetic construct
  source 1..21: mol_type = other DNA
taagtcgtcactgtcctcgtc

SEQ ID NO: 2234 - DNA, 20 bp, synthetic construct
  source 1..20: mol_type = other DNA
aagtcgtcactgtcctcgtc

SEQ ID NO: 2235 - DNA, 21 bp, synthetic construct
  source 1..21: mol_type = other DNA
aagtcgtcactgtcctcgtca

SEQ ID NO: 2236 - DNA, 20 bp, synthetic construct
  source 1..20: mol_type = other DNA
agtcgtcactgtcctcgtca

SEQ ID NO: 2237 - DNA, 21 bp, synthetic construct
  source 1..21: mol_type = other DNA
agtcgtcactgtcctcgtcat

SEQ ID NO: 2238 - DNA, 20 bp, synthetic construct
  source 1..20: mol_type = other DNA
gtcgtcactgtcctcgtcat

SEQ ID NO: 2239 - DNA, 21 bp, synthetic construct
  source 1..21: mol_type = other DNA
gtcgtcactgtcctcgtcatc

SEQ ID NO: 2240 - DNA, 20 bp, synthetic construct
  source 1..20: mol_type = other DNA
tcgtcactgtcctcgtcatc

SEQ ID NO: 2241 - DNA, 21 bp, synthetic construct
  source 1..21: mol_type = other DNA
tcgtcactgtcctcgtcatca

SEQ ID NO: 2242 - DNA, 20 bp, synthetic construct
  source 1..20: mol_type = other DNA
cgtcactgtcctcgtcatca

SEQ ID NO: 2243 - DNA, 21 bp, synthetic construct
  source 1..21: mol_type = other DNA
cgtcactgtcctcgtcatcaa

SEQ ID NO: 2244 - DNA, 20 bp, synthetic construct
  source 1..20: mol_type = other DNA
gtcactgtcctcgtcatcaa

SEQ ID NO: 2245 - DNA, 21 bp, synthetic construct
  source 1..21: mol_type = other DNA
gtcactgtcctcgtcatcaag

SEQ ID NO: 2246 - DNA, 20 bp, synthetic construct
  source 1..20: mol_type = other DNA
tcactgtcctcgtcatcaag

SEQ ID NO: 2247 - DNA, 21 bp, synthetic construct
  source 1..21: mol_type = other DNA
tcactgtcctcgtcatcaaga

SEQ ID NO: 2248 - DNA, 20 bp, synthetic construct
  source 1..20: mol_type = other DNA
cactgtcctcgtcatcaaga

SEQ ID NO: 2249 - DNA, 21 bp, synthetic construct
  source 1..21: mol_type = other DNA
cactgtcctcgtcatcaagaa

SEQ ID NO: 2250 - DNA, 20 bp, synthetic construct
  source 1..20: mol_type = other DNA
actgtcctcgtcatcaagaa

SEQ ID NO: 2251 - DNA, 21 bp, synthetic construct
  source 1..21: mol_type = other DNA
actgtcctcgtcatcaagaac

SEQ ID NO: 2252 - DNA, 20 bp, synthetic construct
  source 1..20: mol_type = other DNA
ctgtcctcgtcatcaagaac

SEQ ID NO: 2253 - DNA, 21 bp, synthetic construct
  source 1..21: mol_type = other DNA
ctgtcctcgtcatcaagaact

SEQ ID NO: 2254 - DNA, 20 bp, synthetic construct
  source 1..20: mol_type = other DNA
tgtcctcgtcatcaagaact

SEQ ID NO: 2255 - DNA, 21 bp, synthetic construct
  source 1..21: mol_type = other DNA
tgtcctcgtcatcaagaactc

SEQ ID NO: 2256 - DNA, 20 bp, synthetic construct
  source 1..20: mol_type = other DNA
gtcctcgtcatcaagaactc

SEQ ID NO: 2257 - DNA, 21 bp, synthetic construct
  source 1..21: mol_type = other DNA
gtcctcgtcatcaagaactct

SEQ ID NO: 2258 - DNA, 20 bp, synthetic construct
  source 1..20: mol_type = other DNA
tcctcgtcatcaagaactct

SEQ ID NO: 2259 - DNA, 21 bp, synthetic construct
  source 1..21: mol_type = other DNA
tcctcgtcatcaagaactctc

SEQ ID NO: 2260 - DNA, 20 bp, synthetic construct
  source 1..20: mol_type = other DNA
cctcgtcatcaagaactctc

SEQ ID NO: 2261 - DNA, 21 bp, synthetic construct
  source 1..21: mol_type = other DNA
cctcgtcatcaagaactctca

SEQ ID NO: 2262 - DNA, 20 bp, synthetic construct
  source 1..20: mol_type = other DNA
ctcgtcatcaagaactctca

SEQ ID NO: 2263 - DNA, 21 bp, synthetic construct
  source 1..21: mol_type = other DNA
ctcgtcatcaagaactctcaa

SEQ ID NO: 2264 - DNA, 20 bp, synthetic construct
  source 1..20: mol_type = other DNA
tcgtcatcaagaactctcaa

SEQ ID NO: 2265 - DNA, 21 bp, synthetic construct
  source 1..21: mol_type = other DNA
tcgtcatcaagaactctcaaa

SEQ ID NO: 2266 - DNA, 20 bp, synthetic construct
  source 1..20: mol_type = other DNA
cgtcatcaagaactctcaaa

SEQ ID NO: 2267 - DNA, 21 bp, synthetic construct
  source 1..21: mol_type = other DNA
cgtcatcaagaactctcaaaa

SEQ ID NO: 2268 - DNA, 20 bp, synthetic construct
  source 1..20: mol_type = other DNA
gtcatcaagaactctcaaaa

SEQ ID NO: 2269 - DNA, 21 bp, synthetic construct
  source 1..21: mol_type = other DNA
gtcatcaagaactctcaaaaa

SEQ ID NO: 2270 - DNA, 20 bp, synthetic construct
  source 1..20: mol_type = other DNA
tcatcaagaactctcaaaaa

SEQ ID NO: 2271 - DNA, 21 bp, synthetic construct
  source 1..21: mol_type = other DNA
tcatcaagaactctcaaaaac

SEQ ID NO: 2272 - DNA, 20 bp, synthetic construct
  source 1..20: mol_type = other DNA
catcaagaactctcaaaaac

SEQ ID NO: 2273 - DNA, 21 bp, synthetic construct
  source 1..21: mol_type = other DNA
catcaagaactctcaaaaaca

SEQ ID NO: 2274 - DNA, 20 bp, synthetic construct
  source 1..20: mol_type = other DNA
atcaagaactctcaaaaaca

SEQ ID NO: 2275 - DNA, 21 bp, synthetic construct
  source 1..21: mol_type = other DNA
atcaagaactctcaaaaacac

SEQ ID NO: 2276 - DNA, 20 bp, synthetic construct
  source 1..20: mol_type = other DNA
tcaagaactctcaaaaacac

SEQ ID NO: 2277 - DNA, 21 bp, synthetic construct
  source 1..21: mol_type = other DNA
tcaagaactctcaaaaacaca

SEQ ID NO: 2278 - DNA, 20 bp, synthetic construct
  source 1..20: mol_type = other DNA
caagaactctcaaaaacaca

SEQ ID NO: 2279 - DNA, 21 bp, synthetic construct
  source 1..21: mol_type = other DNA
caagaactctcaaaaacacag

SEQ ID NO: 2280 - DNA, 20 bp, synthetic construct
  source 1..20: mol_type = other DNA
aagaactctcaaaaacacag

SEQ ID NO: 2281 - DNA, 21 bp, synthetic construct
  source 1..21: mol_type = other DNA
aagaactctcaaaaacacaga

SEQ ID NO: 2282 - DNA, 20 bp, synthetic construct
  source 1..20: mol_type = other DNA
agaactctcaaaaacacaga

SEQ ID NO: 2283 - DNA, 21 bp, synthetic construct
  source 1..21: mol_type = other DNA
agaactctcaaaaacacagag

SEQ ID NO: 2284 - DNA, 20 bp, synthetic construct
  source 1..20: mol_type = other DNA
gaactctcaaaaacacagag

SEQ ID NO: 2285 - DNA, 21 bp, synthetic construct
  source 1..21: mol_type = other DNA
gaactctcaaaaacacagagt

SEQ ID NO: 2286 - DNA, 20 bp, synthetic construct
  source 1..20: mol_type = other DNA
aactctcaaaaacacagagt

SEQ ID NO: 2287 - DNA, 21 bp, synthetic construct
  source 1..21: mol_type = other DNA
aactctcaaaaacacagagtt

SEQ ID NO: 2288 - DNA, 20 bp, synthetic construct
  source 1..20: mol_type = other DNA
actctcaaaaacacagagtt

SEQ ID NO: 2289 - DNA, 21 bp, synthetic construct
  source 1..21: mol_type = other DNA
actctcaaaaacacagagttt

SEQ ID NO: 2290 - DNA, 20 bp, synthetic construct
  source 1..20: mol_type = other DNA
ctctcaaaaacacagagttt

SEQ ID NO: 2291 - DNA, 21 bp, synthetic construct
  source 1..21: mol_type = other DNA
ctctcaaaaacacagagttta

SEQ ID NO: 2292 - DNA, 20 bp, synthetic construct
  source 1..20: mol_type = other DNA
tctcaaaaacacagagttta

SEQ ID NO: 2293 - DNA, 21 bp, synthetic construct
  source 1..21: mol_type = other DNA
tctcaaaaacacagagtttaa

SEQ ID NO: 2294 - DNA, 20 bp, synthetic construct
  source 1..20: mol_type = other DNA
ctcaaaaacacagagtttaa

SEQ ID NO: 2295 - DNA, 21 bp, synthetic construct
  source 1..21: mol_type = other DNA
ctcaaaaacacagagtttaag

SEQ ID NO: 2296 - DNA, 20 bp, synthetic construct
  source 1..20: mol_type = other DNA
tcaaaaacacagagtttaag

SEQ ID NO: 2297 - DNA, 21 bp, synthetic construct
  source 1..21: mol_type = other DNA
tcaaaaacacagagtttaagt

SEQ ID NO: 2298 - DNA, 20 bp, synthetic construct
  source 1..20: mol_type = other DNA
caaaaacacagagtttaagt

SEQ ID NO: 2299 - DNA, 21 bp, synthetic construct
  source 1..21: mol_type = other DNA
caaaaacacagagtttaagtc

SEQ ID NO: 2300 - DNA, 20 bp, synthetic construct
  source 1..20: mol_type = other DNA
aaaaacacagagtttaagtc

SEQ ID NO: 2301 - DNA, 21 bp, synthetic construct
  source 1..21: mol_type = other DNA
aaaaacacagagtttaagtcc

SEQ ID NO: 2302 - DNA, 20 bp, synthetic construct
  source 1..20: mol_type = other DNA
aaaacacagagtttaagtcc

SEQ ID NO: 2303 - DNA, 21 bp, synthetic construct
  source 1..21: mol_type = other DNA
aaaacacagagtttaagtcca

SEQ ID NO: 2304 - DNA, 20 bp, synthetic construct
  source 1..20: mol_type = other DNA
aaacacagagtttaagtcca

SEQ ID NO: 2305 - DNA, 21 bp, synthetic construct
  source 1..21: mol_type = other DNA
aaacacagagtttaagtccac

SEQ ID NO: 2306 - DNA, 20 bp, synthetic construct
  source 1..20: mol_type = other DNA
aacacagagtttaagtccac

SEQ ID NO: 2307 - DNA, 21 bp, synthetic construct
  source 1..21: mol_type = other DNA
aacacagagtttaagtccaca

SEQ ID NO: 2308 - DNA, 20 bp, synthetic construct
  source 1..20: mol_type = other DNA
acacagagtttaagtccaca

SEQ ID NO: 2309 - DNA, 21 bp, synthetic construct
  source 1..21: mol_type = other DNA
acacagagtttaagtccacat

SEQ ID NO: 2310 - DNA, 20 bp, synthetic construct
  source 1..20: mol_type = other DNA
cacagagtttaagtccacat

SEQ ID NO: 2311 - DNA, 21 bp, synthetic construct
  source 1..21: mol_type = other DNA
cacagagtttaagtccacatt

SEQ ID NO: 2312 - DNA, 20 bp, synthetic construct
  source 1..20: mol_type = other DNA
acagagtttaagtccacatt

SEQ ID NO: 2313 - DNA, 21 bp, synthetic construct
  source 1..21: mol_type = other DNA
acagagtttaagtccacattg

SEQ ID NO: 2314 - DNA, 20 bp, synthetic construct
  source 1..20: mol_type = other DNA
cagagtttaagtccacattg

SEQ ID NO: 2315 - DNA, 21 bp, synthetic construct
  source 1..21: mol_type = other DNA
cagagtttaagtccacattga

SEQ ID NO: 2316 - DNA, 20 bp, synthetic construct
  source 1..20: mol_type = other DNA
agagtttaagtccacattga

SEQ ID NO: 2317 - DNA, 21 bp, synthetic construct
  source 1..21: mol_type = other DNA
agagtttaagtccacattgaa

SEQ ID NO: 2318 - DNA, 20 bp, synthetic construct
  source 1..20: mol_type = other DNA
gagtttaagtccacattgaa

SEQ ID NO: 2319 - DNA, 21 bp, synthetic construct
  source 1..21: mol_type = other DNA
gagtttaagtccacattgaag

SEQ ID NO: 2320 - DNA, 20 bp, synthetic construct
  source 1..20: mol_type = other DNA
agtttaagtccacattgaag

SEQ ID NO: 2321 - DNA, 21 bp, synthetic construct
  source 1..21: mol_type = other DNA
agtttaagtccacattgaagg

SEQ ID NO: 2322 - DNA, 20 bp, synthetic construct
  source 1..20: mol_type = other DNA
gtttaagtccacattgaagg

SEQ ID NO: 2323 - DNA, 21 bp, synthetic construct
  source 1..21: mol_type = other DNA
gtttaagtccacattgaaggt

SEQ ID NO: 2324 - DNA, 20 bp, synthetic construct
  source 1..20: mol_type = other DNA
tttaagtccacattgaaggt

SEQ ID NO: 2325 - DNA, 21 bp, synthetic construct
  source 1..21: mol_type = other DNA
tttaagtccacattgaaggta

SEQ ID NO: 2326 - DNA, 20 bp, synthetic construct
  source 1..20: mol_type = other DNA
ttaagtccacattgaaggta

SEQ ID NO: 2327 - DNA, 21 bp, synthetic construct
  source 1..21: mol_type = other DNA
ttaagtccacattgaaggtaa

SEQ ID NO: 2328 - DNA, 20 bp, synthetic construct
  source 1..20: mol_type = other DNA
taagtccacattgaaggtaa

SEQ ID NO: 2329 - DNA, 21 bp, synthetic construct
  source 1..21: mol_type = other DNA
taagtccacattgaaggtaat

SEQ ID NO: 2330 - DNA, 20 bp, synthetic construct
  source 1..20: mol_type = other DNA
aagtccacattgaaggtaat

SEQ ID NO: 2331 - DNA, 21 bp, synthetic construct
  source 1..21: mol_type = other DNA
aagtccacattgaaggtaatt

SEQ ID NO: 2332 - DNA, 20 bp, synthetic construct
  source 1..20: mol_type = other DNA
agtccacattgaaggtaatt

SEQ ID NO: 2333 - DNA, 21 bp, synthetic construct
  source 1..21: mol_type = other DNA
agtccacattgaaggtaattc

SEQ ID NO: 2334 - DNA, 20 bp, synthetic construct
  source 1..20: mol_type = other DNA
gtccacattgaaggtaattc

SEQ ID NO: 2335 - DNA, 21 bp, synthetic construct
  source 1..21: mol_type = other DNA
gtccacattgaaggtaattct

SEQ ID NO: 2336 - DNA, 20 bp, synthetic construct
  source 1..20: mol_type = other DNA
tccacattgaaggtaattct

SEQ ID NO: 2337 - DNA, 21 bp, synthetic construct
  source 1..21: mol_type = other DNA
tccacattgaaggtaattctg

SEQ ID NO: 2338 - DNA, 20 bp, synthetic construct
  source 1..20: mol_type = other DNA
ccacattgaaggtaattctg

SEQ ID NO: 2339 - DNA, 21 bp, synthetic construct
  source 1..21: mol_type = other DNA
ccacattgaaggtaattctgc

SEQ ID NO: 2340 - DNA, 20 bp, synthetic construct
  source 1..20: mol_type = other DNA
cacattgaaggtaattctgc

SEQ ID NO: 2341 - DNA, 21 bp, synthetic construct
  source 1..21: mol_type = other DNA
cacattgaaggtaattctgcc

SEQ ID NO: 2342 - DNA, 20 bp, synthetic construct
  source 1..20: mol_type = other DNA
acattgaaggtaattctgcc

SEQ ID NO: 2343 - DNA, 21 bp, synthetic construct
  source 1..21: mol_type = other DNA
acattgaaggtaattctgccc

SEQ ID NO: 2344 - DNA, 20 bp, synthetic construct
  source 1..20: mol_type = other DNA
cattgaaggtaattctgccc

SEQ ID NO: 2345 - DNA, 21 bp, synthetic construct
  source 1..21: mol_type = other DNA
cattgaaggtaattctgcccc

SEQ ID NO: 2346 - DNA, 20 bp, synthetic construct
  source 1..20: mol_type = other DNA
attgaaggtaattctgcccc

SEQ ID NO: 2347 - DNA, 21 bp, synthetic construct
  source 1..21: mol_type = other DNA
attgaaggtaattctgccccc

SEQ ID NO: 2348 - DNA, 20 bp, synthetic construct
  source 1..20: mol_type = other DNA
ttgaaggtaattctgccccc

SEQ ID NO: 2349 - DNA, 21 bp, synthetic construct
  source 1..21: mol_type = other DNA
ttgaaggtaattctgccccca

SEQ ID NO: 2350 - DNA, 20 bp, synthetic construct
  source 1..20: mol_type = other DNA
tgaaggtaattctgccccca

SEQ ID NO: 2351 - DNA, 21 bp, synthetic construct
  source 1..21: mol_type = other DNA
tgaaggtaattctgcccccag

SEQ ID NO: 2352 - DNA, 20 bp, synthetic construct
  source 1..20: mol_type = other DNA
gaaggtaattctgcccccag

SEQ ID NO: 2353 - DNA, 21 bp, synthetic construct
  source 1..21: mol_type = other DNA
gaaggtaattctgcccccaga

SEQ ID NO: 2354 - DNA, 20 bp, synthetic construct
  source 1..20: mol_type = other DNA
aaggtaattctgcccccaga

SEQ ID NO: 2355 - DNA, 21 bp, synthetic construct
  source 1..21: mol_type = other DNA
aaggtaattctgcccccagac

SEQ ID NO: 2356 - DNA, 20 bp, synthetic construct
  source 1..20: mol_type = other DNA
aggtaattctgcccccagac

SEQ ID NO: 2357 - DNA, 21 bp, synthetic construct
  source 1..21: mol_type = other DNA
aggtaattctgcccccagacc

SEQ ID NO: 2358 - DNA, 20 bp, synthetic construct
  source 1..20: mol_type = other DNA
ggtaattctgcccccagacc

SEQ ID NO: 2359 - DNA, 21 bp, synthetic construct
  source 1..21: mol_type = other DNA
ggtaattctgcccccagaccc

SEQ ID NO: 2360 - DNA, 20 bp, synthetic construct
  source 1..20: mol_type = other DNA
gtaattctgcccccagaccc

SEQ ID NO: 2361 - DNA, 21 bp, synthetic construct
  source 1..21: mol_type = other DNA
gtaattctgcccccagacccc

SEQ ID NO: 2362 - DNA, 20 bp, synthetic construct
  source 1..20: mol_type = other DNA
taattctgcccccagacccc

SEQ ID NO: 2363 - DNA, 21 bp, synthetic construct
  source 1..21: mol_type = other DNA
taattctgcccccagacccct

SEQ ID NO: 2364 - DNA, 20 bp, synthetic construct
  source 1..20: mol_type = other DNA
aattctgcccccagacccct

SEQ ID NO: 2365 - DNA, 21 bp, synthetic construct
  source 1..21: mol_type = other DNA
aattctgcccccagacccctc

SEQ ID NO: 2366 - DNA, 20 bp, synthetic construct
  source 1..20: mol_type = other DNA
attctgcccccagacccctc

SEQ ID NO: 2367 - DNA, 21 bp, synthetic construct
  source 1..21: mol_type = other DNA
attctgcccccagacccctcc

SEQ ID NO: 2368 - DNA, 20 bp, synthetic construct
  source 1..20: mol_type = other DNA
ttctgcccccagacccctcc

SEQ ID NO: 2369 - DNA, 21 bp, synthetic construct
  source 1..21: mol_type = other DNA
ttctgcccccagacccctccg

SEQ ID NO: 2370 - DNA, 20 bp, synthetic construct
  source 1..20: mol_type = other DNA
tctgcccccagacccctccg

SEQ ID NO: 2371 - DNA, 21 bp, synthetic construct
  source 1..21: mol_type = other DNA
tctgcccccagacccctccgt

SEQ ID NO: 2372 - DNA, 20 bp, synthetic construct
  source 1..20: mol_type = other DNA
ctgcccccagacccctccgt

SEQ ID NO: 2373 - DNA, 21 bp, synthetic construct
  source 1..21: mol_type = other DNA
ctgcccccagacccctccgtg

SEQ ID NO: 2374 - DNA, 20 bp, synthetic construct
  source 1..20: mol_type = other DNA
tgcccccagacccctccgtg

SEQ ID NO: 2375 - DNA, 21 bp, synthetic construct
  source 1..21: mol_type = other DNA
tgcccccagacccctccgtgg

SEQ ID NO: 2376 - DNA, 20 bp, synthetic construct
  source 1..20: mol_type = other DNA
gcccccagacccctccgtgg

SEQ ID NO: 2377 - DNA, 21 bp, synthetic construct
  source 1..21: mol_type = other DNA
gcccccagacccctccgtgga

SEQ ID NO: 2378 - DNA, 20 bp, synthetic construct
  source 1..20: mol_type = other DNA
cccccagacccctccgtgga

SEQ ID NO: 2379 - DNA, 21 bp, synthetic construct
  source 1..21: mol_type = other DNA
cccccagacccctccgtggag

SEQ ID NO: 2380 - DNA, 20 bp, synthetic construct
  source 1..20: mol_type = other DNA
ccccagacccctccgtggag

SEQ ID NO: 2381 - DNA, 21 bp, synthetic construct
  source 1..21: mol_type = other DNA
ccccagacccctccgtggagc

SEQ ID NO: 2382 - DNA, 20 bp, synthetic construct
  source 1..20: mol_type = other DNA
cccagacccctccgtggagc

SEQ ID NO: 2383 - DNA, 21 bp, synthetic construct
  source 1..21: mol_type = other DNA
cccagacccctccgtggagct

SEQ ID NO: 2384 - DNA, 20 bp, synthetic construct
  source 1..20: mol_type = other DNA
ccagacccctccgtggagct

SEQ ID NO: 2385 - DNA, 21 bp, synthetic construct
  source 1..21: mol_type = other DNA
ccagacccctccgtggagctg

SEQ ID NO: 2386 - DNA, 20 bp, synthetic construct
  source 1..20: mol_type = other DNA
cagacccctccgtggagctg

SEQ ID NO: 2387 - DNA, 21 bp, synthetic construct
  source 1..21: mol_type = other DNA
cagacccctccgtggagctgt

SEQ ID NO: 2388 - DNA, 20 bp, synthetic construct
  source 1..20: mol_type = other DNA
agacccctccgtggagctgt

SEQ ID NO: 2389 - DNA, 21 bp, synthetic construct
  source 1..21: mol_type = other DNA
agacccctccgtggagctgta

SEQ ID NO: 2390 - DNA, 20 bp, synthetic construct
  source 1..20: mol_type = other DNA
gacccctccgtggagctgta

SEQ ID NO: 2391 - DNA, 21 bp, synthetic construct
  source 1..21: mol_type = other DNA
gacccctccgtggagctgtag

SEQ ID NO: 2392 - DNA, 20 bp, synthetic construct
  source 1..20: mol_type = other DNA
acccctccgtggagctgtag

SEQ ID NO: 2393 - DNA, 21 bp, synthetic construct
  source 1..21: mol_type = other DNA
acccctccgtggagctgtagt

SEQ ID NO: 2394 - DNA, 20 bp, synthetic construct
  source 1..20: mol_type = other DNA
cccctccgtggagctgtagt

SEQ ID NO: 2395 - DNA, 21 bp, synthetic construct
  source 1..21: mol_type = other DNA
cccctccgtggagctgtagtc

SEQ ID NO: 2396 - DNA, 20 bp, synthetic construct
  source 1..20: mol_type = other DNA
ccctccgtggagctgtagtc

SEQ ID NO: 2397 - DNA, 21 bp, synthetic construct
  source 1..21: mol_type = other DNA
ccctccgtggagctgtagtcc

SEQ ID NO: 2398 - DNA, 20 bp, synthetic construct
  source 1..20: mol_type = other DNA
cctccgtggagctgtagtcc

SEQ ID NO: 2399 - DNA, 21 bp, synthetic construct
  source 1..21: mol_type = other DNA
cctccgtggagctgtagtcct

SEQ ID NO: 2400 - DNA, 20 bp, synthetic construct
  source 1..20: mol_type = other DNA
ctccgtggagctgtagtcct

SEQ ID NO: 2401 - DNA, 21 bp, synthetic construct
  source 1..21: mol_type = other DNA
ctccgtggagctgtagtcctc

SEQ ID NO: 2402 - DNA, 20 bp, synthetic construct
  source 1..20: mol_type = other DNA
tccgtggagctgtagtcctc

SEQ ID NO: 2403 - DNA, 21 bp, synthetic construct
  source 1..21: mol_type = other DNA
tccgtggagctgtagtcctct

SEQ ID NO: 2404 - DNA, 20 bp, synthetic construct
  source 1..20: mol_type = other DNA
ccgtggagctgtagtcctct

SEQ ID NO: 2405 - DNA, 21 bp, synthetic construct
  source 1..21: mol_type = other DNA
ccgtggagctgtagtcctctt

SEQ ID NO: 2406 - DNA, 20 bp, synthetic construct
  source 1..20: mol_type = other DNA
cgtggagctgtagtcctctt

SEQ ID NO: 2407 - DNA, 21 bp, synthetic construct
  source 1..21: mol_type = other DNA
cgtggagctgtagtcctcttc

SEQ ID NO: 2408 - DNA, 20 bp, synthetic construct
  source 1..20: mol_type = other DNA
gtggagctgtagtcctcttc

SEQ ID NO: 2409 - DNA, 21 bp, synthetic construct
  source 1..21: mol_type = other DNA
gtggagctgtagtcctcttcg

SEQ ID NO: 2410 - DNA, 20 bp, synthetic construct
  source 1..20: mol_type = other DNA
tggagctgtagtcctcttcg

SEQ ID NO: 2411 - DNA, 21 bp, synthetic construct
  source 1..21: mol_type = other DNA
tggagctgtagtcctcttcgg

SEQ ID NO: 2412 - DNA, 20 bp, synthetic construct
  source 1..20: mol_type = other DNA
ggagctgtagtcctcttcgg

SEQ ID NO: 2413 - DNA, 21 bp, synthetic construct
  source 1..21: mol_type = other DNA
ggagctgtagtcctcttcggg

SEQ ID NO: 2414 - DNA, 20 bp, synthetic construct
  source 1..20: mol_type = other DNA
gagctgtagtcctcttcggg

SEQ ID NO: 2415 - DNA, 21 bp, synthetic construct
  source 1..21: mol_type = other DNA
gagctgtagtcctcttcggga

SEQ ID NO: 2416 - DNA, 20 bp, synthetic construct
  source 1..20: mol_type = other DNA
agctgtagtcctcttcggga

SEQ ID NO: 2417 - DNA, 21 bp, synthetic construct
  source 1..21: mol_type = other DNA
agctgtagtcctcttcgggaa

SEQ ID NO: 2418 - DNA, 20 bp, synthetic construct
  source 1..20: mol_type = other DNA
gctgtagtcctcttcgggaa

SEQ ID NO: 2419 - DNA, 21 bp, synthetic construct
  source 1..21: mol_type = other DNA
gctgtagtcctcttcgggaaa

SEQ ID NO: 2420 - DNA, 20 bp, synthetic construct
  source 1..20: mol_type = other DNA
ctgtagtcctcttcgggaaa

SEQ ID NO: 2421 - DNA, 21 bp, synthetic construct
  source 1..21: mol_type = other DNA
ctgtagtcctcttcgggaaaa

SEQ ID NO: 2422 - DNA, 20 bp, synthetic construct
  source 1..20: mol_type = other DNA
tgtagtcctcttcgggaaaa

SEQ ID NO: 2423 - DNA, 21 bp, synthetic construct
  source 1..21: mol_type = other DNA
tgtagtcctcttcgggaaaag

SEQ ID NO: 2424 - DNA, 20 bp, synthetic construct
  source 1..20: mol_type = other DNA
gtagtcctcttcgggaaaag

SEQ ID NO: 2425 - DNA, 21 bp, synthetic construct
  source 1..21: mol_type = other DNA
gtagtcctcttcgggaaaagg

SEQ ID NO: 2426 - DNA, 20 bp, synthetic construct
  source 1..20: mol_type = other DNA
tagtcctcttcgggaaaagg

SEQ ID NO: 2427 - DNA, 21 bp, synthetic construct
  source 1..21: mol_type = other DNA
tagtcctcttcgggaaaaggg

SEQ ID NO: 2428 - DNA, 20 bp, synthetic construct
  source 1..20: mol_type = other DNA
agtcctcttcgggaaaaggg

SEQ ID NO: 2429 - DNA, 21 bp, synthetic construct
  source 1..21: mol_type = other DNA
agtcctcttcgggaaaagggt

SEQ ID NO: 2430 - DNA, 20 bp, synthetic construct
  source 1..20: mol_type = other DNA
gtcctcttcgggaaaagggt

SEQ ID NO: 2431 - DNA, 21 bp, synthetic construct
  source 1..21: mol_type = other DNA
gtcctcttcgggaaaagggtc

SEQ ID NO: 2432 - DNA, 20 bp, synthetic construct
  source 1..20: mol_type = other DNA
tcctcttcgggaaaagggtc

SEQ ID NO: 2433 - DNA, 21 bp, synthetic construct
  source 1..21: mol_type = other DNA
tcctcttcgggaaaagggtcc

SEQ ID NO: 2434 - DNA, 20 bp, synthetic construct
  source 1..20: mol_type = other DNA
cctcttcgggaaaagggtcc

SEQ ID NO: 2435 - DNA, 21 bp, synthetic construct
  source 1..21: mol_type = other DNA
cctcttcgggaaaagggtcct

SEQ ID NO: 2436 - DNA, 20 bp, synthetic construct
  source 1..20: mol_type = other DNA
ctcttcgggaaaagggtcct

SEQ ID NO: 2437 - DNA, 21 bp, synthetic construct
  source 1..21: mol_type = other DNA
ctcttcgggaaaagggtcctg

SEQ ID NO: 2438 - DNA, 20 bp, synthetic construct
  source 1..20: mol_type = other DNA
tcttcgggaaaagggtcctg

SEQ ID NO: 2439 - DNA, 21 bp, synthetic construct
  source 1..21: mol_type = other DNA
tcttcgggaaaagggtcctgg

SEQ ID NO: 2440 - DNA, 20 bp, synthetic construct
  source 1..20: mol_type = other DNA
cttcgggaaaagggtcctgg

SEQ ID NO: 2441 - DNA, 21 bp, synthetic construct
  source 1..21: mol_type = other DNA
cttcgggaaaagggtcctgga

SEQ ID NO: 2442 - DNA, 20 bp, synthetic construct
  source 1..20: mol_type = other DNA
ttcgggaaaagggtcctgga

SEQ ID NO: 2443 - DNA, 21 bp, synthetic construct
  source 1..21: mol_type = other DNA
ttcgggaaaagggtcctggag

SEQ ID NO: 2444 - DNA, 20 bp, synthetic construct
  source 1..20: mol_type = other DNA
tcgggaaaagggtcctggag

SEQ ID NO: 2445 - DNA, 21 bp, synthetic construct
  source 1..21: mol_type = other DNA
tcgggaaaagggtcctggagt

SEQ ID NO: 2446 - DNA, 20 bp, synthetic construct
  source 1..20: mol_type = other DNA
cgggaaaagggtcctggagt

SEQ ID NO: 2447 - DNA, 21 bp, synthetic construct
  source 1..21: mol_type = other DNA
cgggaaaagggtcctggagtg

SEQ ID NO: 2448 - DNA, 20 bp, synthetic construct
  source 1..20: mol_type = other DNA
gggaaaagggtcctggagtg

SEQ ID NO: 2449 - DNA, 21 bp, synthetic construct
  source 1..21: mol_type = other DNA
gggaaaagggtcctggagtgg

SEQ ID NO: 2450 - DNA, 20 bp, synthetic construct
  source 1..20: mol_type = other DNA
ggaaaagggtcctggagtgg

SEQ ID NO: 2451 - DNA, 21 bp, synthetic construct
  source 1..21: mol_type = other DNA
ggaaaagggtcctggagtgga

SEQ ID NO: 2452 - DNA, 20 bp, synthetic construct
  source 1..20: mol_type = other DNA
gaaaagggtcctggagtgga

SEQ ID NO: 2453 - DNA, 21 bp, synthetic construct
  source 1..21: mol_type = other DNA
gaaaagggtcctggagtggac

SEQ ID NO: 2454 - DNA, 20 bp, synthetic construct
  source 1..20: mol_type = other DNA
aaaagggtcctggagtggac

SEQ ID NO: 2455 - DNA, 21 bp, synthetic construct
  source 1..21: mol_type = other DNA
aaaagggtcctggagtggact

SEQ ID NO: 2456 - DNA, 20 bp, synthetic construct
  source 1..20: mol_type = other DNA
aaagggtcctggagtggact

SEQ ID NO: 2457 - DNA, 21 bp, synthetic construct
  source 1..21: mol_type = other DNA
aaagggtcctggagtggactc

SEQ ID NO: 2458 - DNA, 20 bp, synthetic construct
  source 1..20: mol_type = other DNA
aagggtcctggagtggactc

SEQ ID NO: 2459 - DNA, 21 bp, synthetic construct
  source 1..21: mol_type = other DNA
aagggtcctggagtggactct

SEQ ID NO: 2460 - DNA, 20 bp, synthetic construct
  source 1..20: mol_type = other DNA
agggtcctggagtggactct

SEQ ID NO: 2461 - DNA, 21 bp, synthetic construct
  source 1..21: mol_type = other DNA
agggtcctggagtggactctt

SEQ ID NO: 2462 - DNA, 20 bp, synthetic construct
  source 1..20: mol_type = other DNA
gggtcctggagtggactctt

SEQ ID NO: 2463 - DNA, 21 bp, synthetic construct
  source 1..21: mol_type = other DNA
gggtcctggagtggactcttt

SEQ ID NO: 2464 - DNA, 20 bp, synthetic construct
  source 1..20: mol_type = other DNA
ggtcctggagtggactcttt

SEQ ID NO: 2465 - DNA, 21 bp, synthetic construct
  source 1..21: mol_type = other DNA
ggtcctggagtggactctttc

SEQ ID NO: 2466 - DNA, 20 bp, synthetic construct
  source 1..20: mol_type = other DNA
gtcctggagtggactctttc

SEQ ID NO: 2467 - DNA, 21 bp, synthetic construct
  source 1..21: mol_type = other DNA
gtcctggagtggactctttct

SEQ ID NO: 2468 - DNA, 20 bp, synthetic construct
  source 1..20: mol_type = other DNA
tcctggagtggactctttct

SEQ ID NO: 2469 - DNA, 21 bp, synthetic construct
  source 1..21: mol_type = other DNA
tcctggagtggactctttctc

SEQ ID NO: 2470 - DNA, 20 bp, synthetic construct
  source 1..20: mol_type = other DNA
cctggagtggactctttctc

SEQ ID NO: 2471 - DNA, 21 bp, synthetic construct
  source 1..21: mol_type = other DNA
cctggagtggactctttctcc

SEQ ID NO: 2472 - DNA, 20 bp, synthetic construct
  source 1..20: mol_type = other DNA
ctggagtggactctttctcc

SEQ ID NO: 2473 - DNA, 21 bp, synthetic construct
  source 1..21: mol_type = other DNA
ctggagtggactctttctcct

SEQ ID NO: 2474 - DNA, 20 bp, synthetic construct
  source 1..20: mol_type = other DNA
tggagtggactctttctcct

SEQ ID NO: 2475 - DNA, 21 bp, synthetic construct
  source 1..21: mol_type = other DNA
tggagtggactctttctcctc

SEQ ID NO: 2476 - DNA, 20 bp, synthetic construct
  source 1..20: mol_type = other DNA
ggagtggactctttctcctc

SEQ ID NO: 2477 - DNA, 21 bp, synthetic construct
  source 1..21: mol_type = other DNA
ggagtggactctttctcctct

SEQ ID NO: 2478 - DNA, 20 bp, synthetic construct
  source 1..20: mol_type = other DNA
gagtggactctttctcctct

SEQ ID NO: 2479 - DNA, 21 bp, synthetic construct
  source 1..21: mol_type = other DNA
gagtggactctttctcctctc

SEQ ID NO: 2480 - DNA, 20 bp, synthetic construct
  source 1..20: mol_type = other DNA
agtggactctttctcctctc

SEQ ID NO: 2481 - DNA, 21 bp, synthetic construct
  source 1..21: mol_type = other DNA
agtggactctttctcctctca

SEQ ID NO: 2482 - DNA, 20 bp, synthetic construct
  source 1..20: mol_type = other DNA
gtggactctttctcctctca

SEQ ID NO: 2483 - DNA, 21 bp, synthetic construct
  source 1..21: mol_type = other DNA
gtggactctttctcctctcac

SEQ ID NO: 2484 - DNA, 20 bp, synthetic construct
  source 1..20: mol_type = other DNA
tggactctttctcctctcac

SEQ ID NO: 2485 - DNA, 21 bp, synthetic construct
  source 1..21: mol_type = other DNA
tggactctttctcctctcaca

SEQ ID NO: 2486 - DNA, 20 bp, synthetic construct
  source 1..20: mol_type = other DNA
ggactctttctcctctcaca

SEQ ID NO: 2487 - DNA, 21 bp, synthetic construct
  source 1..21: mol_type = other DNA
ggactctttctcctctcacag

SEQ ID NO: 2488 - DNA, 20 bp, synthetic construct
  source 1..20: mol_type = other DNA
gactctttctcctctcacag

SEQ ID NO: 2489 - DNA, 21 bp, synthetic construct
  source 1..21: mol_type = other DNA
gactctttctcctctcacagg

SEQ ID NO: 2490 - DNA, 20 bp, synthetic construct
  source 1..20: mol_type = other DNA
actctttctcctctcacagg

SEQ ID NO: 2491 - DNA, 21 bp, synthetic construct
  source 1..21: mol_type = other DNA
actctttctcctctcacaggg

SEQ ID NO: 2492 - DNA, 20 bp, synthetic construct
  source 1..20: mol_type = other DNA
ctctttctcctctcacaggg

SEQ ID NO: 2493 - DNA, 21 bp, synthetic construct
  source 1..21: mol_type = other DNA
ctctttctcctctcacagggc

SEQ ID NO: 2494 - DNA, 20 bp, synthetic construct
  source 1..20: mol_type = other DNA
tctttctcctctcacagggc

SEQ ID NO: 2495 - DNA, 21 bp, synthetic construct
  source 1..21: mol_type = other DNA
tctttctcctctcacagggcc

SEQ ID NO: 2496 - DNA, 20 bp, synthetic construct
  source 1..20: mol_type = other DNA
ctttctcctctcacagggcc

SEQ ID NO: 2497 - DNA, 21 bp, synthetic construct
  source 1..21: mol_type = other DNA
ctttctcctctcacagggccc

SEQ ID NO: 2498 - DNA, 20 bp, synthetic construct
  source 1..20: mol_type = other DNA
tttctcctctcacagggccc

SEQ ID NO: 2499 - DNA, 21 bp, synthetic construct
  source 1..21: mol_type = other DNA
tttctcctctcacagggccca

SEQ ID NO: 2500 - DNA, 20 bp, synthetic construct
  source 1..20: mol_type = other DNA
ttctcctctcacagggccca

SEQ ID NO: 2501 - DNA, 21 bp, synthetic construct
  source 1..21: mol_type = other DNA
ttctcctctcacagggcccac

SEQ ID NO: 2502 - DNA, 20 bp, synthetic construct
  source 1..20: mol_type = other DNA
tctcctctcacagggcccac

SEQ ID NO: 2503 - DNA, 21 bp, synthetic construct
  source 1..21: mol_type = other DNA
tctcctctcacagggcccact

SEQ ID NO: 2504 - DNA, 20 bp, synthetic construct
  source 1..20: mol_type = other DNA
ctcctctcacagggcccact

SEQ ID NO: 2505 - DNA, 21 bp, synthetic construct
  source 1..21: mol_type = other DNA
ctcctctcacagggcccactc

SEQ ID NO: 2506 - DNA, 20 bp, synthetic construct
  source 1..20: mol_type = other DNA
tcctctcacagggcccactc

SEQ ID NO: 2507 - DNA, 21 bp, synthetic construct
  source 1..21: mol_type = other DNA
tcctctcacagggcccactca

SEQ ID NO: 2508 - DNA, 20 bp, synthetic construct
  source 1..20: mol_type = other DNA
cctctcacagggcccactca

SEQ ID NO: 2509 - DNA, 21 bp, synthetic construct
  source 1..21: mol_type = other DNA
cctctcacagggcccactcaa

SEQ ID NO: 2510 - DNA, 20 bp, synthetic construct
  source 1..20: mol_type = other DNA
ctctcacagggcccactcaa

SEQ ID NO: 2511 - DNA, 21 bp, synthetic construct
  source 1..21: mol_type = other DNA
ctctcacagggcccactcaag

SEQ ID NO: 2512 - DNA, 20 bp, synthetic construct
  source 1..20: mol_type = other DNA
tctcacagggcccactcaag

SEQ ID NO: 2513 - DNA, 21 bp, synthetic construct
  source 1..21: mol_type = other DNA
tctcacagggcccactcaaga

SEQ ID NO: 2514 - DNA, 20 bp, synthetic construct
  source 1..20: mol_type = other DNA
ctcacagggcccactcaaga

SEQ ID NO: 2515 - DNA, 21 bp, synthetic construct
  source 1..21: mol_type = other DNA
ctcacagggcccactcaagag

SEQ ID NO: 2516 - DNA, 20 bp, synthetic construct
  source 1..20: mol_type = other DNA
tcacagggcccactcaagag

SEQ ID NO: 2517 - DNA, 21 bp, synthetic construct
  source 1..21: mol_type = other DNA
tcacagggcccactcaagagt

SEQ ID NO: 2518 - DNA, 20 bp, synthetic construct
  source 1..20: mol_type = other DNA
cacagggcccactcaagagt

SEQ ID NO: 2519 - DNA, 21 bp, synthetic construct
  source 1..21: mol_type = other DNA
cacagggcccactcaagagtt

SEQ ID NO: 2520 - DNA, 20 bp, synthetic construct
  source 1..20: mol_type = other DNA
acagggcccactcaagagtt

SEQ ID NO: 2521 - DNA, 21 bp, synthetic construct
  source 1..21: mol_type = other DNA
acagggcccactcaagagttc

SEQ ID NO: 2522 - DNA, 20 bp, synthetic construct
  source 1..20: mol_type = other DNA
cagggcccactcaagagttc

SEQ ID NO: 2523 - DNA, 21 bp, synthetic construct
  source 1..21: mol_type = other DNA
cagggcccactcaagagttcc

SEQ ID NO: 2524 - DNA, 20 bp, synthetic construct
  source 1..20: mol_type = other DNA
agggcccactcaagagttcc

SEQ ID NO: 2525 - DNA, 21 bp, synthetic construct
  source 1..21: mol_type = other DNA
agggcccactcaagagttcca

SEQ ID NO: 2526 - DNA, 20 bp, synthetic construct
  source 1..20: mol_type = other DNA
gggcccactcaagagttcca

SEQ ID NO: 2527 - DNA, 21 bp, synthetic construct
  source 1..21: mol_type = other DNA
gggcccactcaagagttccaa

SEQ ID NO: 2528 - DNA, 20 bp, synthetic construct
  source 1..20: mol_type = other DNA
ggcccactcaagagttccaa

SEQ ID NO: 2529 - DNA, 21 bp, synthetic construct
  source 1..21: mol_type = other DNA
ggcccactcaagagttccaac

SEQ ID NO: 2530 - DNA, 20 bp, synthetic construct
  source 1..20: mol_type = other DNA
gcccactcaagagttccaac

SEQ ID NO: 2531 - DNA, 21 bp, synthetic construct
  source 1..21: mol_type = other DNA
gcccactcaagagttccaact

SEQ ID NO: 2532 - DNA, 20 bp, synthetic construct
  source 1..20: mol_type = other DNA
cccactcaagagttccaact

SEQ ID NO: 2533 - DNA, 21 bp, synthetic construct
  source 1..21: mol_type = other DNA
cccactcaagagttccaactg

SEQ ID NO: 2534 - DNA, 20 bp, synthetic construct
  source 1..20: mol_type = other DNA
ccactcaagagttccaactg

SEQ ID NO: 2535 - DNA, 21 bp, synthetic construct
  source 1..21: mol_type = other DNA
ccactcaagagttccaactgc

SEQ ID NO: 2536 - DNA, 20 bp, synthetic construct
  source 1..20: mol_type = other DNA
cactcaagagttccaactgc

SEQ ID NO: 2537 - DNA, 21 bp, synthetic construct
  source 1..21: mol_type = other DNA
cactcaagagttccaactgct

SEQ ID NO: 2538 - DNA, 20 bp, synthetic construct
  source 1..20: mol_type = other DNA
actcaagagttccaactgct

SEQ ID NO: 2539 - DNA, 21 bp, synthetic construct
  source 1..21: mol_type = other DNA
actcaagagttccaactgctg

SEQ ID NO: 2540 - DNA, 20 bp, synthetic construct
  source 1..20: mol_type = other DNA
ctcaagagttccaactgctg

SEQ ID NO: 2541 - DNA, 21 bp, synthetic construct
  source 1..21: mol_type = other DNA
ctcaagagttccaactgctga

SEQ ID NO: 2542 - DNA, 20 bp, synthetic construct
  source 1..20: mol_type = other DNA
tcaagagttccaactgctga

SEQ ID NO: 2543 - DNA, 21 bp, synthetic construct
  source 1..21: mol_type = other DNA
tcaagagttccaactgctgag

SEQ ID NO: 2544 - DNA, 20 bp, synthetic construct
  source 1..20: mol_type = other DNA
caagagttccaactgctgag

SEQ ID NO: 2545 - DNA, 21 bp, synthetic construct
  source 1..21: mol_type = other DNA
caagagttccaactgctgagg

SEQ ID NO: 2546 - DNA, 20 bp, synthetic construct
  source 1..20: mol_type = other DNA
aagagttccaactgctgagg

SEQ ID NO: 2547 - DNA, 21 bp, synthetic construct
  source 1..21: mol_type = other DNA
aagagttccaactgctgaggg

SEQ ID NO: 2548 - DNA, 20 bp, synthetic construct
  source 1..20: mol_type = other DNA
agagttccaactgctgaggg

SEQ ID NO: 2549 - DNA, 21 bp, synthetic construct
  source 1..21: mol_type = other DNA
agagttccaactgctgagggc

SEQ ID NO: 2550 - DNA, 20 bp, synthetic construct
  source 1..20: mol_type = other DNA
gagttccaactgctgagggc

SEQ ID NO: 2551 - DNA, 21 bp, synthetic construct
  source 1..21: mol_type = other DNA
gagttccaactgctgagggct

SEQ ID NO: 2552 - DNA, 20 bp, synthetic construct
  source 1..20: mol_type = other DNA
agttccaactgctgagggct

SEQ ID NO: 2553 - DNA, 21 bp, synthetic construct
  source 1..21: mol_type = other DNA
agttccaactgctgagggctg

SEQ ID NO: 2554 - DNA, 20 bp, synthetic construct
  source 1..20: mol_type = other DNA
gttccaactgctgagggctg

SEQ ID NO: 2555 - DNA, 21 bp, synthetic construct
  source 1..21: mol_type = other DNA
gttccaactgctgagggctgt

SEQ ID NO: 2556 - DNA, 20 bp, synthetic construct
  source 1..20: mol_type = other DNA
ttccaactgctgagggctgt

SEQ ID NO: 2557 - DNA, 21 bp, synthetic construct
  source 1..21: mol_type = other DNA
ttccaactgctgagggctgtc

SEQ ID NO: 2558 - DNA, 20 bp, synthetic construct
  source 1..20: mol_type = other DNA
tccaactgctgagggctgtc

SEQ ID NO: 2559 - DNA, 21 bp, synthetic construct
  source 1..21: mol_type = other DNA
tccaactgctgagggctgtcc

SEQ ID NO: 2560 - DNA, 20 bp, synthetic construct
  source 1..20: mol_type = other DNA
ccaactgctgagggctgtcc

SEQ ID NO: 2561 - DNA, 21 bp, synthetic construct
  source 1..21: mol_type = other DNA
ccaactgctgagggctgtcct

SEQ ID NO: 2562 - DNA, 20 bp, synthetic construct
  source 1..20: mol_type = other DNA
caactgctgagggctgtcct

SEQ ID NO: 2563 - DNA, 21 bp, synthetic construct
  source 1..21: mol_type = other DNA
caactgctgagggctgtcctt

SEQ ID NO: 2564 - DNA, 20 bp, synthetic construct
  source 1..20: mol_type = other DNA
aactgctgagggctgtcctt

SEQ ID NO: 2565 - DNA, 21 bp, synthetic construct
  source 1..21: mol_type = other DNA
aactgctgagggctgtccttt

SEQ ID NO: 2566 - DNA, 20 bp, synthetic construct
  source 1..20: mol_type = other DNA
actgctgagggctgtccttt

SEQ ID NO: 2567 - DNA, 21 bp, synthetic construct
  source 1..21: mol_type = other DNA
actgctgagggctgtcctttg

SEQ ID NO: 2568 - DNA, 20 bp, synthetic construct
  source 1..20: mol_type = other DNA
ctgctgagggctgtcctttg

SEQ ID NO: 2569 - DNA, 21 bp, synthetic construct
  source 1..21: mol_type = other DNA
ctgctgagggctgtcctttgg

SEQ ID NO: 2570 - DNA, 20 bp, synthetic construct
  source 1..20: mol_type = other DNA
tgctgagggctgtcctttgg

SEQ ID NO: 2571 - DNA, 21 bp, synthetic construct
  source 1..21: mol_type = other DNA
tgctgagggctgtcctttggc

SEQ ID NO: 2572 - DNA, 20 bp, synthetic construct
  source 1..20: mol_type = other DNA
gctgagggctgtcctttggc

SEQ ID NO: 2573 - DNA, 21 bp, synthetic construct
  source 1..21: mol_type = other DNA
gctgagggctgtcctttggca

SEQ ID NO: 2574 - DNA, 20 bp, synthetic construct
  source 1..20: mol_type = other DNA
ctgagggctgtcctttggca

SEQ ID NO: 2575 - DNA, 21 bp, synthetic construct
  source 1..21: mol_type = other DNA
ctgagggctgtcctttggcat

SEQ ID NO: 2576 - DNA, 20 bp, synthetic construct
  source 1..20: mol_type = other DNA
tgagggctgtcctttggcat

SEQ ID NO: 2577 - DNA, 21 bp, synthetic construct
  source 1..21: mol_type = other DNA
tgagggctgtcctttggcatc

SEQ ID NO: 2578 - DNA, 20 bp, synthetic construct
  source 1..20: mol_type = other DNA
gagggctgtcctttggcatc

SEQ ID NO: 2579 - DNA, 21 bp, synthetic construct
  source 1..21: mol_type = other DNA
gagggctgtcctttggcatcg

SEQ ID NO: 2580 - DNA, 20 bp, synthetic construct
  source 1..20: mol_type = other DNA
agggctgtcctttggcatcg

SEQ ID NO: 2581 - DNA, 21 bp, synthetic construct
  source 1..21: mol_type = other DNA
agggctgtcctttggcatcgt

SEQ ID NO: 2582 - DNA, 20 bp, synthetic construct
  source 1..20: mol_type = other DNA
gggctgtcctttggcatcgt

SEQ ID NO: 2583 - DNA, 21 bp, synthetic construct
  source 1..21: mol_type = other DNA
gggctgtcctttggcatcgtg

SEQ ID NO: 2584 - DNA, 20 bp, synthetic construct
  source 1..20: mol_type = other DNA
ggctgtcctttggcatcgtg

SEQ ID NO: 2585 - DNA, 21 bp, synthetic construct
  source 1..21: mol_type = other DNA
ggctgtcctttggcatcgtgg

SEQ ID NO: 2586 - DNA, 20 bp, synthetic construct
  source 1..20: mol_type = other DNA
gctgtcctttggcatcgtgg

SEQ ID NO: 2587 - DNA, 21 bp, synthetic construct
  source 1..21: mol_type = other DNA
gctgtcctttggcatcgtggg

SEQ ID NO: 2588 - DNA, 20 bp, synthetic construct
  source 1..20: mol_type = other DNA
ctgtcctttggcatcgtggg

SEQ ID NO: 2589 - DNA, 21 bp, synthetic construct
  source 1..21: mol_type = other DNA
ctgtcctttggcatcgtgggg

SEQ ID NO: 2590 - DNA, 20 bp, synthetic construct
  source 1..20: mol_type = other DNA
tgtcctttggcatcgtgggg

SEQ ID NO: 2591 - DNA, 21 bp, synthetic construct
  source 1..21: mol_type = other DNA
tgtcctttggcatcgtgggga

SEQ ID NO: 2592 - DNA, 20 bp, synthetic construct
  source 1..20: mol_type = other DNA
gtcctttggcatcgtgggga

SEQ ID NO: 2593 - DNA, 21 bp, synthetic construct
  source 1..21: mol_type = other DNA
gtcctttggcatcgtggggag

SEQ ID NO: 2594 - DNA, 20 bp, synthetic construct
  source 1..20: mol_type = other DNA
tcctttggcatcgtggggag

SEQ ID NO: 2595 - DNA, 21 bp, synthetic construct
  source 1..21: mol_type = other DNA
tcctttggcatcgtggggagc

SEQ ID NO: 2596 - DNA, 20 bp, synthetic construct
  source 1..20: mol_type = other DNA
cctttggcatcgtggggagc

SEQ ID NO: 2597 - DNA, 21 bp, synthetic construct
  source 1..21: mol_type = other DNA
cctttggcatcgtggggagct

SEQ ID NO: 2598 - DNA, 20 bp, synthetic construct
  source 1..20: mol_type = other DNA
ctttggcatcgtggggagct

SEQ ID NO: 2599 - DNA, 21 bp, synthetic construct
  source 1..21: mol_type = other DNA
ctttggcatcgtggggagctc

SEQ ID NO: 2600 - DNA, 20 bp, synthetic construct
  source 1..20: mol_type = other DNA
tttggcatcgtggggagctc

SEQ ID NO: 2601 - DNA, 21 bp, synthetic construct
  source 1..21: mol_type = other DNA
tttggcatcgtggggagctcc

SEQ ID NO: 2602 - DNA, 20 bp, synthetic construct
  source 1..20: mol_type = other DNA
ttggcatcgtggggagctcc

SEQ ID NO: 2603 - DNA, 21 bp, synthetic construct
  source 1..21: mol_type = other DNA
ttggcatcgtggggagctcca

SEQ ID NO: 2604 - DNA, 20 bp, synthetic construct
  source 1..20: mol_type = other DNA
tggcatcgtggggagctcca

SEQ ID NO: 2605 - DNA, 21 bp, synthetic construct
  source 1..21: mol_type = other DNA
tggcatcgtggggagctccac

SEQ ID NO: 2606 - DNA, 20 bp, synthetic construct
  source 1..20: mol_type = other DNA
ggcatcgtggggagctccac

SEQ ID NO: 2607 - DNA, 21 bp, synthetic construct
  source 1..21: mol_type = other DNA
ggcatcgtggggagctccaca

SEQ ID NO: 2608 - DNA, 20 bp, synthetic construct
  source 1..20: mol_type = other DNA
gcatcgtggggagctccaca

SEQ ID NO: 2609 - DNA, 21 bp, synthetic construct
  source 1..21: mol_type = other DNA
gcatcgtggggagctccacat

SEQ ID NO: 2610 - DNA, 20 bp, synthetic construct
  source 1..20: mol_type = other DNA
catcgtggggagctccacat

SEQ ID NO: 2611 - DNA, 21 bp, synthetic construct
  source 1..21: mol_type = other DNA
catcgtggggagctccacatc

SEQ ID NO: 2612 - DNA, 20 bp, synthetic construct
  source 1..20: mol_type = other DNA
atcgtggggagctccacatc

SEQ ID NO: 2613 - DNA, 21 bp, synthetic construct
  source 1..21: mol_type = other DNA
atcgtggggagctccacatca

SEQ ID NO: 2614 - DNA, 20 bp, synthetic construct
  source 1..20: mol_type = other DNA
tcgtggggagctccacatca

SEQ ID NO: 2615 - DNA, 21 bp, synthetic construct
  source 1..21: mol_type = other DNA
tcgtggggagctccacatcaa

SEQ ID NO: 2616 - DNA, 20 bp, synthetic construct
  source 1..20: mol_type = other DNA
cgtggggagctccacatcaa

SEQ ID NO: 2617 - DNA, 21 bp, synthetic construct
  source 1..21: mol_type = other DNA
cgtggggagctccacatcaac

SEQ ID NO: 2618 - DNA, 20 bp, synthetic construct
  source 1..20: mol_type = other DNA
gtggggagctccacatcaac

SEQ ID NO: 2619 - DNA, 21 bp, synthetic construct
  source 1..21: mol_type = other DNA
gtggggagctccacatcaacc

SEQ ID NO: 2620 - DNA, 20 bp, synthetic construct
  source 1..20: mol_type = other DNA
tggggagctccacatcaacc

SEQ ID NO: 2621 - DNA, 21 bp, synthetic construct
  source 1..21: mol_type = other DNA
tggggagctccacatcaacct

SEQ ID NO: 2622 - DNA, 20 bp, synthetic construct
  source 1..20: mol_type = other DNA
ggggagctccacatcaacct

SEQ ID NO: 2623 - DNA, 21 bp, synthetic construct
  source 1..21: mol_type = other DNA
ggggagctccacatcaacctc

SEQ ID NO: 2624 - DNA, 20 bp, synthetic construct
  source 1..20: mol_type = other DNA
gggagctccacatcaacctc

SEQ ID NO: 2625 - DNA, 21 bp, synthetic construct
  source 1..21: mol_type = other DNA
gggagctccacatcaacctca

SEQ ID NO: 2626 - DNA, 20 bp, synthetic construct
  source 1..20: mol_type = other DNA
ggagctccacatcaacctca

SEQ ID NO: 2627 - DNA, 21 bp, synthetic construct
  source 1..21: mol_type = other DNA
ggagctccacatcaacctcag

SEQ ID NO: 2628 - DNA, 20 bp, synthetic construct
  source 1..20: mol_type = other DNA
gagctccacatcaacctcag

SEQ ID NO: 2629 - DNA, 21 bp, synthetic construct
  source 1..21: mol_type = other DNA
gagctccacatcaacctcagg

SEQ ID NO: 2630 - DNA, 20 bp, synthetic construct
  source 1..20: mol_type = other DNA
agctccacatcaacctcagg

SEQ ID NO: 2631 - DNA, 21 bp, synthetic construct
  source 1..21: mol_type = other DNA
agctccacatcaacctcaggc

SEQ ID NO: 2632 - DNA, 20 bp, synthetic construct
  source 1..20: mol_type = other DNA
gctccacatcaacctcaggc

SEQ ID NO: 2633 - DNA, 21 bp, synthetic construct
  source 1..21: mol_type = other DNA
gctccacatcaacctcaggca

SEQ ID NO: 2634 - DNA, 20 bp, synthetic construct
  source 1..20: mol_type = other DNA
ctccacatcaacctcaggca

SEQ ID NO: 2635 - DNA, 21 bp, synthetic construct
  source 1..21: mol_type = other DNA
ctccacatcaacctcaggcag

SEQ ID NO: 2636 - DNA, 20 bp, synthetic construct
  source 1..20: mol_type = other DNA
tccacatcaacctcaggcag

SEQ ID NO: 2637 - DNA, 21 bp, synthetic construct
  source 1..21: mol_type = other DNA
tccacatcaacctcaggcagg

SEQ ID NO: 2638 - DNA, 20 bp, synthetic construct
  source 1..20: mol_type = other DNA
ccacatcaacctcaggcagg

SEQ ID NO: 2639 - DNA, 21 bp, synthetic construct
  source 1..21: mol_type = other DNA
ccacatcaacctcaggcaggt

SEQ ID NO: 2640 - DNA, 20 bp, synthetic construct
  source 1..20: mol_type = other DNA
cacatcaacctcaggcaggt

SEQ ID NO: 2641 - DNA, 21 bp, synthetic construct
  source 1..21: mol_type = other DNA
cacatcaacctcaggcaggtc

SEQ ID NO: 2642 - DNA, 20 bp, synthetic construct
  source 1..20: mol_type = other DNA
acatcaacctcaggcaggtc

SEQ ID NO: 2643 - DNA, 21 bp, synthetic construct
  source 1..21: mol_type = other DNA
acatcaacctcaggcaggtca

SEQ ID NO: 2644 - DNA, 20 bp, synthetic construct
  source 1..20: mol_type = other DNA
catcaacctcaggcaggtca

SEQ ID NO: 2645 - DNA, 21 bp, synthetic construct
  source 1..21: mol_type = other DNA
catcaacctcaggcaggtcag

SEQ ID NO: 2646 - DNA, 20 bp, synthetic construct
  source 1..20: mol_type = other DNA
atcaacctcaggcaggtcag

SEQ ID NO: 2647 - DNA, 21 bp, synthetic construct
  source 1..21: mol_type = other DNA
atcaacctcaggcaggtcagg

SEQ ID NO: 2648 - DNA, 20 bp, synthetic construct
  source 1..20: mol_type = other DNA
tcaacctcaggcaggtcagg

SEQ ID NO: 2649 - DNA, 21 bp, synthetic construct
  source 1..21: mol_type = other DNA
tcaacctcaggcaggtcaggc

SEQ ID NO: 2650 - DNA, 20 bp, synthetic construct
  source 1..20: mol_type = other DNA
caacctcaggcaggtcaggc

SEQ ID NO: 2651 - DNA, 21 bp, synthetic construct
  source 1..21: mol_type = other DNA
caacctcaggcaggtcaggct

SEQ ID NO: 2652 - DNA, 20 bp, synthetic construct
  source 1..20: mol_type = other DNA
aacctcaggcaggtcaggct

SEQ ID NO: 2653 - DNA, 21 bp, synthetic construct
  source 1..21: mol_type = other DNA
aacctcaggcaggtcaggctc

SEQ ID NO: 2654 - DNA, 20 bp, synthetic construct
  source 1..20: mol_type = other DNA
acctcaggcaggtcaggctc

SEQ ID NO: 2655 - DNA, 21 bp, synthetic construct
  source 1..21: mol_type = other DNA
acctcaggcaggtcaggctcc

SEQ ID NO: 2656 - DNA, 20 bp, synthetic construct
  source 1..20: mol_type = other DNA
cctcaggcaggtcaggctcc

SEQ ID NO: 2657 - DNA, 21 bp, synthetic construct
  source 1..21: mol_type = other DNA
cctcaggcaggtcaggctcct

SEQ ID NO: 2658 - DNA, 20 bp, synthetic construct
  source 1..20: mol_type = other DNA
ctcaggcaggtcaggctcct

SEQ ID NO: 2659 - DNA, 21 bp, synthetic construct
  source 1..21: mol_type = other DNA
ctcaggcaggtcaggctcctc

SEQ ID NO: 2660 - DNA, 20 bp, synthetic construct
  source 1..20: mol_type = other DNA
tcaggcaggtcaggctcctc

SEQ ID NO: 2661 - DNA, 21 bp, synthetic construct
  source 1..21: mol_type = other DNA
tcaggcaggtcaggctcctcc

SEQ ID NO: 2662 - DNA, 20 bp, synthetic construct
  source 1..20: mol_type = other DNA
caggcaggtcaggctcctcc

SEQ ID NO: 2663 - DNA, 21 bp, synthetic construct
  source 1..21: mol_type = other DNA
caggcaggtcaggctcctcct

SEQ ID NO: 2664 - DNA, 20 bp, synthetic construct
  source 1..20: mol_type = other DNA
aggcaggtcaggctcctcct

SEQ ID NO: 2665 - DNA, 21 bp, synthetic construct
  source 1..21: mol_type = other DNA
aggcaggtcaggctcctcctc

SEQ ID NO: 2666 - DNA, 20 bp, synthetic construct
  source 1..20: mol_type = other DNA
ggcaggtcaggctcctcctc

SEQ ID NO: 2667 - DNA, 21 bp, synthetic construct
  source 1..21: mol_type = other DNA
ggcaggtcaggctcctcctcg

SEQ ID NO: 2668 - DNA, 20 bp, synthetic construct
  source 1..20: mol_type = other DNA
gcaggtcaggctcctcctcg

SEQ ID NO: 2669 - DNA, 21 bp, synthetic construct
  source 1..21: mol_type = other DNA
gcaggtcaggctcctcctcgg

SEQ ID NO: 2670 - DNA, 20 bp, synthetic construct
  source 1..20: mol_type = other DNA
caggtcaggctcctcctcgg

SEQ ID NO: 2671 - DNA, 21 bp, synthetic construct
  source 1..21: mol_type = other DNA
caggtcaggctcctcctcgga

SEQ ID NO: 2672 - DNA, 20 bp, synthetic construct
  source 1..20: mol_type = other DNA
aggtcaggctcctcctcgga

SEQ ID NO: 2673 - DNA, 21 bp, synthetic construct
  source 1..21: mol_type = other DNA
aggtcaggctcctcctcggac

SEQ ID NO: 2674 - DNA, 20 bp, synthetic construct
  source 1..20: mol_type = other DNA
ggtcaggctcctcctcggac

SEQ ID NO: 2675 - DNA, 21 bp, synthetic construct
  source 1..21: mol_type = other DNA
ggtcaggctcctcctcggact

SEQ ID NO: 2676 - DNA, 20 bp, synthetic construct
  source 1..20: mol_type = other DNA
gtcaggctcctcctcggact

SEQ ID NO: 2677 - DNA, 21 bp, synthetic construct
  source 1..21: mol_type = other DNA
gtcaggctcctcctcggactc

SEQ ID NO: 2678 - DNA, 20 bp, synthetic construct
  source 1..20: mol_type = other DNA
tcaggctcctcctcggactc

SEQ ID NO: 2679 - DNA, 21 bp, synthetic construct
  source 1..21: mol_type = other DNA
tcaggctcctcctcggactcc

SEQ ID NO: 2680 - DNA, 20 bp, synthetic construct
  source 1..20: mol_type = other DNA
caggctcctcctcggactcc

SEQ ID NO: 2681 - DNA, 21 bp, synthetic construct
  source 1..21: mol_type = other DNA
caggctcctcctcggactccg

SEQ ID NO: 2682 - DNA, 20 bp, synthetic construct
  source 1..20: mol_type = other DNA
aggctcctcctcggactccg

SEQ ID NO: 2683 - DNA, 21 bp, synthetic construct
  source 1..21: mol_type = other DNA
aggctcctcctcggactccgg

SEQ ID NO: 2684 - DNA, 20 bp, synthetic construct
  source 1..20: mol_type = other DNA
ggctcctcctcggactccgg

SEQ ID NO: 2685 - DNA, 21 bp, synthetic construct
  source 1..21: mol_type = other DNA
ggctcctcctcggactccggg

SEQ ID NO: 2686 - DNA, 20 bp, synthetic construct
  source 1..20: mol_type = other DNA
gctcctcctcggactccggg

SEQ ID NO: 2687 - DNA, 21 bp, synthetic construct
  source 1..21: mol_type = other DNA
gctcctcctcggactccgggt

SEQ ID NO: 2688 - DNA, 20 bp, synthetic construct
  source 1..20: mol_type = other DNA
ctcctcctcggactccgggt

SEQ ID NO: 2689 - DNA, 21 bp, synthetic construct
  source 1..21: mol_type = other DNA
ctcctcctcggactccgggtc

SEQ ID NO: 2690 - DNA, 20 bp, synthetic construct
  source 1..20: mol_type = other DNA
tcctcctcggactccgggtc

SEQ ID NO: 2691 - DNA, 21 bp, synthetic construct
  source 1..21: mol_type = other DNA
tcctcctcggactccgggtct

SEQ ID NO: 2692 - DNA, 20 bp, synthetic construct
  source 1..20: mol_type = other DNA
cctcctcggactccgggtct

SEQ ID NO: 2693 - DNA, 21 bp, synthetic construct
  source 1..21: mol_type = other DNA
cctcctcggactccgggtcta

SEQ ID NO: 2694 - DNA, 20 bp, synthetic construct
  source 1..20: mol_type = other DNA
ctcctcggactccgggtcta

SEQ ID NO: 2695 - DNA, 21 bp, synthetic construct
  source 1..21: mol_type = other DNA
ctcctcggactccgggtctat

SEQ ID NO: 2696 - DNA, 20 bp, synthetic construct
  source 1..20: mol_type = other DNA
tcctcggactccgggtctat

SEQ ID NO: 2697 - DNA, 21 bp, synthetic construct
  source 1..21: mol_type = other DNA
tcctcggactccgggtctatc

SEQ ID NO: 2698 - DNA, 20 bp, synthetic construct
  source 1..20: mol_type = other DNA
cctcggactccgggtctatc

SEQ ID NO: 2699 - DNA, 21 bp, synthetic construct
  source 1..21: mol_type = other DNA
cctcggactccgggtctatca

SEQ ID NO: 2700 - DNA, 20 bp, synthetic construct
  source 1..20: mol_type = other DNA
ctcggactccgggtctatca

SEQ ID NO: 2701 - DNA, 21 bp, synthetic construct
  source 1..21: mol_type = other DNA
ctcggactccgggtctatcaa

SEQ ID NO: 2702 - DNA, 20 bp, synthetic construct
  source 1..20: mol_type = other DNA
tcggactccgggtctatcaa

SEQ ID NO: 2703 - DNA, 21 bp, synthetic construct
  source 1..21: mol_type = other DNA
tcggactccgggtctatcaac

SEQ ID NO: 2704 - DNA, 20 bp, synthetic construct
  source 1..20: mol_type = other DNA
cggactccgggtctatcaac

SEQ ID NO: 2705 - DNA, 21 bp, synthetic construct
  source 1..21: mol_type = other DNA
cggactccgggtctatcaact

SEQ ID NO: 2706 - DNA, 20 bp, synthetic construct
  source 1..20: mol_type = other DNA
ggactccgggtctatcaact

SEQ ID NO: 2707 - DNA, 21 bp, synthetic construct
  source 1..21: mol_type = other DNA
ggactccgggtctatcaactg

SEQ ID NO: 2708 - DNA, 20 bp, synthetic construct
  source 1..20: mol_type = other DNA
gactccgggtctatcaactg

SEQ ID NO: 2709 - DNA, 21 bp, synthetic construct
  source 1..21: mol_type = other DNA
gactccgggtctatcaactgg

SEQ ID NO: 2710 - DNA, 20 bp, synthetic construct
  source 1..20: mol_type = other DNA
actccgggtctatcaactgg

SEQ ID NO: 2711 - DNA, 21 bp, synthetic construct
  source 1..21: mol_type = other DNA
actccgggtctatcaactggg

SEQ ID NO: 2712 - DNA, 20 bp, synthetic construct
  source 1..20: mol_type = other DNA
ctccgggtctatcaactggg

SEQ ID NO: 2713 - DNA, 21 bp, synthetic construct
  source 1..21: mol_type = other DNA
ctccgggtctatcaactggga

SEQ ID NO: 2714 - DNA, 20 bp, synthetic construct
  source 1..20: mol_type = other DNA
tccgggtctatcaactggga

SEQ ID NO: 2715 - DNA, 21 bp, synthetic construct
  source 1..21: mol_type = other DNA
tccgggtctatcaactgggat

SEQ ID NO: 2716 - DNA, 20 bp, synthetic construct
  source 1..20: mol_type = other DNA
ccgggtctatcaactgggat

SEQ ID NO: 2717 - DNA, 21 bp, synthetic construct
  source 1..21: mol_type = other DNA
ccgggtctatcaactgggatt

SEQ ID NO: 2718 - DNA, 20 bp, synthetic construct
  source 1..20: mol_type = other DNA
cgggtctatcaactgggatt

SEQ ID NO: 2719 - DNA, 21 bp, synthetic construct
  source 1..21: mol_type = other DNA
cgggtctatcaactgggattc

SEQ ID NO: 2720 - DNA, 20 bp, synthetic construct
  source 1..20: mol_type = other DNA
gggtctatcaactgggattc

SEQ ID NO: 2721 - DNA, 21 bp, synthetic construct
  source 1..21: mol_type = other DNA
gggtctatcaactgggattct

SEQ ID NO: 2722 - DNA, 20 bp, synthetic construct
  source 1..20: mol_type = other DNA
ggtctatcaactgggattct

SEQ ID NO: 2723 - DNA, 21 bp, synthetic construct
  source 1..21: mol_type = other DNA
ggtctatcaactgggattctg

SEQ ID NO: 2724 - DNA, 20 bp, synthetic construct
  source 1..20: mol_type = other DNA
gtctatcaactgggattctg

SEQ ID NO: 2725 - DNA, 21 bp, synthetic construct
  source 1..21: mol_type = other DNA
gtctatcaactgggattctgt

SEQ ID NO: 2726 - DNA, 20 bp, synthetic construct
  source 1..20: mol_type = other DNA
tctatcaactgggattctgt

SEQ ID NO: 2727 - DNA, 21 bp, synthetic construct
  source 1..21: mol_type = other DNA
tctatcaactgggattctgta

SEQ ID NO: 2728 - DNA, 20 bp, synthetic construct
  source 1..20: mol_type = other DNA
ctatcaactgggattctgta

SEQ ID NO: 2729 - DNA, 21 bp, synthetic construct
  source 1..21: mol_type = other DNA
ctatcaactgggattctgtag

SEQ ID NO: 2730 - DNA, 20 bp, synthetic construct
  source 1..20: mol_type = other DNA
tatcaactgggattctgtag

SEQ ID NO: 2731 - DNA, 21 bp, synthetic construct
  source 1..21: mol_type = other DNA
tatcaactgggattctgtaga

SEQ ID NO: 2732 - DNA, 20 bp, synthetic construct
  source 1..20: mol_type = other DNA
atcaactgggattctgtaga

SEQ ID NO: 2733 - DNA, 21 bp, synthetic construct
  source 1..21: mol_type = other DNA
atcaactgggattctgtagag

SEQ ID NO: 2734 - DNA, 20 bp, synthetic construct
  source 1..20: mol_type = other DNA
tcaactgggattctgtagag

SEQ ID NO: 2735 - DNA, 21 bp, synthetic construct
  source 1..21: mol_type = other DNA
tcaactgggattctgtagagg

SEQ ID NO: 2736 - DNA, 20 bp, synthetic construct
  source 1..20: mol_type = other DNA
caactgggattctgtagagg

SEQ ID NO: 2737 - DNA, 21 bp, synthetic construct
  source 1..21: mol_type = other DNA
caactgggattctgtagaggt

SEQ ID NO: 2738 - DNA, 20 bp, synthetic construct
  source 1..20: mol_type = other DNA
aactgggattctgtagaggt

SEQ ID NO: 2739 - DNA, 21 bp, synthetic construct
  source 1..21: mol_type = other DNA
aactgggattctgtagaggtg

SEQ ID NO: 2740 - DNA, 20 bp, synthetic construct
  source 1..20: mol_type = other DNA
actgggattctgtagaggtg

SEQ ID NO: 2741 - DNA, 21 bp, synthetic construct
  source 1..21: mol_type = other DNA
actgggattctgtagaggtgg

SEQ ID NO: 2742 - DNA, 20 bp, synthetic construct
  source 1..20: mol_type = other DNA
ctgggattctgtagaggtgg

SEQ ID NO: 2743 - DNA, 21 bp, synthetic construct
  source 1..21: mol_type = other DNA
ctgggattctgtagaggtggc

SEQ ID NO: 2744 - DNA, 20 bp, synthetic construct
  source 1..20: mol_type = other DNA
tgggattctgtagaggtggc

SEQ ID NO: 2745 - DNA, 21 bp, synthetic construct
  source 1..21: mol_type = other DNA
tgggattctgtagaggtggca

SEQ ID NO: 2746 - DNA, 20 bp, synthetic construct
  source 1..20: mol_type = other DNA
gggattctgtagaggtggca

SEQ ID NO: 2747 - DNA, 21 bp, synthetic construct
  source 1..21: mol_type = other DNA
gggattctgtagaggtggcag

SEQ ID NO: 2748 - DNA, 20 bp, synthetic construct
  source 1..20: mol_type = other DNA
ggattctgtagaggtggcag

SEQ ID NO: 2749 - DNA, 21 bp, synthetic construct
  source 1..21: mol_type = other DNA
ggattctgtagaggtggcaga

SEQ ID NO: 2750 - DNA, 20 bp, synthetic construct
  source 1..20: mol_type = other DNA
gattctgtagaggtggcaga

SEQ ID NO: 2751 - DNA, 21 bp, synthetic construct
  source 1..21: mol_type = other DNA
gattctgtagaggtggcagag

SEQ ID NO: 2752 - DNA, 20 bp, synthetic construct
  source 1..20: mol_type = other DNA
attctgtagaggtggcagag

SEQ ID NO: 2753 - DNA, 21 bp, synthetic construct
  source 1..21: mol_type = other DNA
attctgtagaggtggcagagg

SEQ ID NO: 2754 - DNA, 20 bp, synthetic construct
  source 1..20: mol_type = other DNA
ttctgtagaggtggcagagg

SEQ ID NO: 2755 - DNA, 21 bp, synthetic construct
  source 1..21: mol_type = other DNA
ttctgtagaggtggcagaggc

SEQ ID NO: 2756 - DNA, 20 bp, synthetic construct
  source 1..20: mol_type = other DNA
tctgtagaggtggcagaggc

SEQ ID NO: 2757 - DNA, 21 bp, synthetic construct
  source 1..21: mol_type = other DNA
tctgtagaggtggcagaggcc

SEQ ID NO: 2758 - DNA, 20 bp, synthetic construct
  source 1..20: mol_type = other DNA
ctgtagaggtggcagaggcc

SEQ ID NO: 2759 - DNA, 21 bp, synthetic construct
  source 1..21: mol_type = other DNA
ctgtagaggtggcagaggcct

SEQ ID NO: 2760 - DNA, 20 bp, synthetic construct
  source 1..20: mol_type = other DNA
tgtagaggtggcagaggcct

SEQ ID NO: 2761 - DNA, 21 bp, synthetic construct
  source 1..21: mol_type = other DNA
tgtagaggtggcagaggcctg

SEQ ID NO: 2762 - DNA, 20 bp, synthetic construct
  source 1..20: mol_type = other DNA
gtagaggtggcagaggcctg

SEQ ID NO: 2763 - DNA, 21 bp, synthetic construct
  source 1..21: mol_type = other DNA
gtagaggtggcagaggcctga

SEQ ID NO: 2764 - DNA, 20 bp, synthetic construct
  source 1..20: mol_type = other DNA
tagaggtggcagaggcctga

SEQ ID NO: 2765 - DNA, 21 bp, synthetic construct
  source 1..21: mol_type = other DNA
tagaggtggcagaggcctgac

SEQ ID NO: 2766 - DNA, 20 bp, synthetic construct
  source 1..20: mol_type = other DNA
agaggtggcagaggcctgac

SEQ ID NO: 2767 - DNA, 21 bp, synthetic construct
  source 1..21: mol_type = other DNA
agaggtggcagaggcctgacc

SEQ ID NO: 2768 - DNA, 20 bp, synthetic construct
  source 1..20: mol_type = other DNA
gaggtggcagaggcctgacc

SEQ ID NO: 2769 - DNA, 21 bp, synthetic construct
  source 1..21: mol_type = other DNA
gaggtggcagaggcctgaccc

SEQ ID NO: 2770 - DNA, 20 bp, synthetic construct
  source 1..20: mol_type = other DNA
aggtggcagaggcctgaccc

SEQ ID NO: 2771 - DNA, 21 bp, synthetic construct
  source 1..21: mol_type = other DNA
aggtggcagaggcctgaccca

SEQ ID NO: 2772 - DNA, 20 bp, synthetic construct
  source 1..20: mol_type = other DNA
ggtggcagaggcctgaccca

SEQ ID NO: 2773 - DNA, 21 bp, synthetic construct
  source 1..21: mol_type = other DNA
ggtggcagaggcctgacccag

SEQ ID NO: 2774 - DNA, 20 bp, synthetic construct
  source 1..20: mol_type = other DNA
gtggcagaggcctgacccag

SEQ ID NO: 2775 - DNA, 21 bp, synthetic construct
  source 1..21: mol_type = other DNA
gtggcagaggcctgacccaga

SEQ ID NO: 2776 - DNA, 20 bp, synthetic construct
  source 1..20: mol_type = other DNA
tggcagaggcctgacccaga

SEQ ID NO: 2777 - DNA, 21 bp, synthetic construct
  source 1..21: mol_type = other DNA
tggcagaggcctgacccagag

SEQ ID NO: 2778 - DNA, 20 bp, synthetic construct
  source 1..20: mol_type = other DNA
ggcagaggcctgacccagag

SEQ ID NO: 2779 - DNA, 21 bp, synthetic construct
  source 1..21: mol_type = other DNA
ggcagaggcctgacccagagg

SEQ ID NO: 2780 - DNA, 20 bp, synthetic construct
  source 1..20: mol_type = other DNA
gcagaggcctgacccagagg

SEQ ID NO: 2781 - DNA, 21 bp, synthetic construct
  source 1..21: mol_type = other DNA
gcagaggcctgacccagaggc

SEQ ID NO: 2782 - DNA, 20 bp, synthetic construct
  source 1..20: mol_type = other DNA
cagaggcctgacccagaggc

SEQ ID NO: 2783 - DNA, 21 bp, synthetic construct
  source 1..21: mol_type = other DNA
cagaggcctgacccagaggcc

SEQ ID NO: 2784 - DNA, 20 bp, synthetic construct
  source 1..20: mol_type = other DNA
agaggcctgacccagaggcc

SEQ ID NO: 2785 - DNA, 21 bp, synthetic construct
  source 1..21: mol_type = other DNA
agaggcctgacccagaggcct

SEQ ID NO: 2786 - DNA, 20 bp, synthetic construct
  source 1..20: mol_type = other DNA
gaggcctgacccagaggcct

SEQ ID NO: 2787 - DNA, 21 bp, synthetic construct
  source 1..21: mol_type = other DNA
gaggcctgacccagaggcctg

SEQ ID NO: 2788 - DNA, 20 bp, synthetic construct
  source 1..20: mol_type = other DNA
aggcctgacccagaggcctg

SEQ ID NO: 2789 - DNA, 21 bp, synthetic construct
  source 1..21: mol_type = other DNA
aggcctgacccagaggcctga

SEQ ID NO: 2790 - DNA, 20 bp, synthetic construct
  source 1..20: mol_type = other DNA
ggcctgacccagaggcctga

SEQ ID NO: 2791 - DNA, 21 bp, synthetic construct
  source 1..21: mol_type = other DNA
ggcctgacccagaggcctgac

SEQ ID NO: 2792 - DNA, 20 bp, synthetic construct
  source 1..20: mol_type = other DNA
gcctgacccagaggcctgac

SEQ ID NO: 2793 - DNA, 21 bp, synthetic construct
  source 1..21: mol_type = other DNA
gcctgacccagaggcctgaca

SEQ ID NO: 2794 - DNA, 20 bp, synthetic construct
  source 1..20: mol_type = other DNA
cctgacccagaggcctgaca

SEQ ID NO: 2795 - DNA, 21 bp, synthetic construct
  source 1..21: mol_type = other DNA
cctgacccagaggcctgacag

SEQ ID NO: 2796 - DNA, 20 bp, synthetic construct
  source 1..20: mol_type = other DNA
ctgacccagaggcctgacag

SEQ ID NO: 2797 - DNA, 21 bp, synthetic construct
  source 1..21: mol_type = other DNA
ctgacccagaggcctgacagt

SEQ ID NO: 2798 - DNA, 20 bp, synthetic construct
  source 1..20: mol_type = other DNA
tgacccagaggcctgacagt

SEQ ID NO: 2799 - DNA, 21 bp, synthetic construct
  source 1..21: mol_type = other DNA
tgacccagaggcctgacagtc

SEQ ID NO: 2800 - DNA, 20 bp, synthetic construct
  source 1..20: mol_type = other DNA
gacccagaggcctgacagtc

SEQ ID NO: 2801 - DNA, 21 bp, synthetic construct
  source 1..21: mol_type = other DNA
gacccagaggcctgacagtca

SEQ ID NO: 2802 - DNA, 20 bp, synthetic construct
  source 1..20: mol_type = other DNA
acccagaggcctgacagtca

SEQ ID NO: 2803 - DNA, 21 bp, synthetic construct
  source 1..21: mol_type = other DNA
acccagaggcctgacagtcag

SEQ ID NO: 2804 - DNA, 20 bp, synthetic construct
  source 1..20: mol_type = other DNA
cccagaggcctgacagtcag

SEQ ID NO: 2805 - DNA, 21 bp, synthetic construct
  source 1..21: mol_type = other DNA
cccagaggcctgacagtcagt

SEQ ID NO: 2806 - DNA, 20 bp, synthetic construct
  source 1..20: mol_type = other DNA
ccagaggcctgacagtcagt

SEQ ID NO: 2807 - DNA, 21 bp, synthetic construct
  source 1..21: mol_type = other DNA
ccagaggcctgacagtcagtc

SEQ ID NO: 2808 - DNA, 20 bp, synthetic construct
  source 1..20: mol_type = other DNA
cagaggcctgacagtcagtc

SEQ ID NO: 2809 - DNA, 21 bp, synthetic construct
  source 1..21: mol_type = other DNA
cagaggcctgacagtcagtcc

SEQ ID NO: 2810 - DNA, 20 bp, synthetic construct
  source 1..20: mol_type = other DNA
agaggcctgacagtcagtcc

SEQ ID NO: 2811 - DNA, 21 bp, synthetic construct
  source 1..21: mol_type = other DNA
agaggcctgacagtcagtcca

SEQ ID NO: 2812 - DNA, 20 bp, synthetic construct
  source 1..20: mol_type = other DNA
gaggcctgacagtcagtcca

SEQ ID NO: 2813 - DNA, 21 bp, synthetic construct
  source 1..21: mol_type = other DNA
gaggcctgacagtcagtccat

SEQ ID NO: 2814 - DNA, 20 bp, synthetic construct
  source 1..20: mol_type = other DNA
aggcctgacagtcagtccat

SEQ ID NO: 2815 - DNA, 21 bp, synthetic construct
  source 1..21: mol_type = other DNA
aggcctgacagtcagtccatg

SEQ ID NO: 2816 - DNA, 20 bp, synthetic construct
  source 1..20: mol_type = other DNA
ggcctgacagtcagtccatg

SEQ ID NO: 2817 - DNA, 21 bp, synthetic construct
  source 1..21: mol_type = other DNA
ggcctgacagtcagtccatgc

SEQ ID NO: 2818 - DNA, 20 bp, synthetic construct
  source 1..20: mol_type = other DNA
gcctgacagtcagtccatgc

SEQ ID NO: 2819 - DNA, 21 bp, synthetic construct
  source 1..21: mol_type = other DNA
gcctgacagtcagtccatgca

SEQ ID NO: 2820 - DNA, 20 bp, synthetic construct
  source 1..20: mol_type = other DNA
cctgacagtcagtccatgca

SEQ ID NO: 2821 - DNA, 21 bp, synthetic construct
  source 1..21: mol_type = other DNA
cctgacagtcagtccatgcat

SEQ ID NO: 2822 - DNA, 20 bp, synthetic construct
  source 1..20: mol_type = other DNA
ctgacagtcagtccatgcat

SEQ ID NO: 2823 - DNA, 21 bp, synthetic construct
  source 1..21: mol_type = other DNA
ctgacagtcagtccatgcatg

SEQ ID NO: 2824 - DNA, 20 bp, synthetic construct
  source 1..20: mol_type = other DNA
tgacagtcagtccatgcatg

SEQ ID NO: 2825 - DNA, 21 bp, synthetic construct
  source 1..21: mol_type = other DNA
tgacagtcagtccatgcatgg

SEQ ID NO: 2826 - DNA, 20 bp, synthetic construct
  source 1..20: mol_type = other DNA
gacagtcagtccatgcatgg

SEQ ID NO: 2827 - DNA, 21 bp, synthetic construct
  source 1..21: mol_type = other DNA
gacagtcagtccatgcatggt

SEQ ID NO: 2828 - DNA, 20 bp, synthetic construct
  source 1..20: mol_type = other DNA
acagtcagtccatgcatggt

SEQ ID NO: 2829 - DNA, 21 bp, synthetic construct
  source 1..21: mol_type = other DNA
acagtcagtccatgcatggta

SEQ ID NO: 2830 - DNA, 20 bp, synthetic construct
  source 1..20: mol_type = other DNA
cagtcagtccatgcatggta

SEQ ID NO: 2831 - DNA, 21 bp, synthetic construct
  source 1..21: mol_type = other DNA
cagtcagtccatgcatggtat

SEQ ID NO: 2832 - DNA, 20 bp, synthetic construct
  source 1..20: mol_type = other DNA
agtcagtccatgcatggtat

SEQ ID NO: 2833 - DNA, 21 bp, synthetic construct
  source 1..21: mol_type = other DNA
agtcagtccatgcatggtata

SEQ ID NO: 2834 - DNA, 20 bp, synthetic construct
  source 1..20: mol_type = other DNA
gtcagtccatgcatggtata

SEQ ID NO: 2835 - DNA, 21 bp, synthetic construct
  source 1..21: mol_type = other DNA
gtcagtccatgcatggtatag

SEQ ID NO: 2836 - DNA, 20 bp, synthetic construct
  source 1..20: mol_type = other DNA
tcagtccatgcatggtatag

SEQ ID NO: 2837 - DNA, 21 bp, synthetic construct
  source 1..21: mol_type = other DNA
tcagtccatgcatggtatagc

SEQ ID NO: 2838 - DNA, 20 bp, synthetic construct
  source 1..20: mol_type = other DNA
cagtccatgcatggtatagc

SEQ ID NO: 2839 - DNA, 21 bp, synthetic construct
  source 1..21: mol_type = other DNA
cagtccatgcatggtatagcc

SEQ ID NO: 2840 - DNA, 20 bp, synthetic construct
  source 1..20: mol_type = other DNA
agtccatgcatggtatagcc

SEQ ID NO: 2841 - DNA, 21 bp, synthetic construct
  source 1..21: mol_type = other DNA
agtccatgcatggtatagcca

SEQ ID NO: 2842 - DNA, 20 bp, synthetic construct
  source 1..20: mol_type = other DNA
gtccatgcatggtatagcca

SEQ ID NO: 2843 - DNA, 21 bp, synthetic construct
  source 1..21: mol_type = other DNA
gtccatgcatggtatagccac

SEQ ID NO: 2844 - DNA, 20 bp, synthetic construct
  source 1..20: mol_type = other DNA
tccatgcatggtatagccac

SEQ ID NO: 2845 - DNA, 21 bp, synthetic construct
  source 1..21: mol_type = other DNA
tccatgcatggtatagccacc

SEQ ID NO: 2846 - DNA, 20 bp, synthetic construct
  source 1..20: mol_type = other DNA
ccatgcatggtatagccacc

SEQ ID NO: 2847 - DNA, 21 bp, synthetic construct
  source 1..21: mol_type = other DNA
ccatgcatggtatagccaccg

SEQ ID NO: 2848 - DNA, 20 bp, synthetic construct
  source 1..20: mol_type = other DNA
catgcatggtatagccaccg

SEQ ID NO: 2849 - DNA, 21 bp, synthetic construct
  source 1..21: mol_type = other DNA
catgcatggtatagccaccgc

SEQ ID NO: 2850 - DNA, 20 bp, synthetic construct
  source 1..20: mol_type = other DNA
atgcatggtatagccaccgc

SEQ ID NO: 2851 - DNA, 21 bp, synthetic construct
  source 1..21: mol_type = other DNA
atgcatggtatagccaccgcc

SEQ ID NO: 2852 - DNA, 20 bp, synthetic construct
  source 1..20: mol_type = other DNA
tgcatggtatagccaccgcc

SEQ ID NO: 2853 - DNA, 21 bp, synthetic construct
  source 1..21: mol_type = other DNA
tgcatggtatagccaccgcca

SEQ ID NO: 2854 - DNA, 20 bp, synthetic construct
  source 1..20: mol_type = other DNA
gcatggtatagccaccgcca

SEQ ID NO: 2855 - DNA, 21 bp, synthetic construct
  source 1..21: mol_type = other DNA
gcatggtatagccaccgccac

SEQ ID NO: 2856 - DNA, 20 bp, synthetic construct
  source 1..20: mol_type = other DNA
catggtatagccaccgccac

SEQ ID NO: 2857 - DNA, 21 bp, synthetic construct
  source 1..21: mol_type = other DNA
catggtatagccaccgccact

SEQ ID NO: 2858 - DNA, 20 bp, synthetic construct
  source 1..20: mol_type = other DNA
atggtatagccaccgccact

SEQ ID NO: 2859 - DNA, 21 bp, synthetic construct
  source 1..21: mol_type = other DNA
atggtatagccaccgccactt

SEQ ID NO: 2860 - DNA, 20 bp, synthetic construct
  source 1..20: mol_type = other DNA
tggtatagccaccgccactt

SEQ ID NO: 2861 - DNA, 21 bp, synthetic construct
  source 1..21: mol_type = other DNA
tggtatagccaccgccacttg

SEQ ID NO: 2862 - DNA, 20 bp, synthetic construct
  source 1..20: mol_type = other DNA
ggtatagccaccgccacttg

SEQ ID NO: 2863 - DNA, 21 bp, synthetic construct
  source 1..21: mol_type = other DNA
ggtatagccaccgccacttgt

SEQ ID NO: 2864 - DNA, 20 bp, synthetic construct
  source 1..20: mol_type = other DNA
gtatagccaccgccacttgt

SEQ ID NO: 2865 - DNA, 21 bp, synthetic construct
  source 1..21: mol_type = other DNA
gtatagccaccgccacttgtc

SEQ ID NO: 2866 - DNA, 20 bp, synthetic construct
  source 1..20: mol_type = other DNA
tatagccaccgccacttgtc

SEQ ID NO: 2867 - DNA, 21 bp, synthetic construct
  source 1..21: mol_type = other DNA
tatagccaccgccacttgtcc

SEQ ID NO: 2868 - DNA, 20 bp, synthetic construct
  source 1..20: mol_type = other DNA
atagccaccgccacttgtcc

SEQ ID NO: 2869 - DNA, 21 bp, synthetic construct
  source 1..21: mol_type = other DNA
atagccaccgccacttgtcct

SEQ ID NO: 2870 - DNA, 20 bp, synthetic construct
  source 1..20: mol_type = other DNA
tagccaccgccacttgtcct

SEQ ID NO: 2871 - DNA, 21 bp, synthetic construct
  source 1..21: mol_type = other DNA
tagccaccgccacttgtcctg

SEQ ID NO: 2872 - DNA, 20 bp, synthetic construct
  source 1..20: mol_type = other DNA
agccaccgccacttgtcctg

SEQ ID NO: 2873 - DNA, 21 bp, synthetic construct
  source 1..21: mol_type = other DNA
agccaccgccacttgtcctgg

SEQ ID NO: 2874 - DNA, 20 bp, synthetic construct
  source 1..20: mol_type = other DNA
gccaccgccacttgtcctgg

SEQ ID NO: 2875 - DNA, 21 bp, synthetic construct
  source 1..21: mol_type = other DNA
gccaccgccacttgtcctggg

SEQ ID NO: 2876 - DNA, 20 bp, synthetic construct
  source 1..20: mol_type = other DNA
ccaccgccacttgtcctggg

SEQ ID NO: 2877 - DNA, 21 bp, synthetic construct
  source 1..21: mol_type = other DNA
ccaccgccacttgtcctgggc

SEQ ID NO: 2878 - DNA, 20 bp, synthetic construct
  source 1..20: mol_type = other DNA
caccgccacttgtcctgggc

SEQ ID NO: 2879 - DNA, 21 bp, synthetic construct
  source 1..21: mol_type = other DNA
caccgccacttgtcctgggcg

SEQ ID NO: 2880 - DNA, 20 bp, synthetic construct
  source 1..20: mol_type = other DNA
accgccacttgtcctgggcg

SEQ ID NO: 2881 - DNA, 21 bp, synthetic construct
  source 1..21: mol_type = other DNA
accgccacttgtcctgggcgc

SEQ ID NO: 2882 - DNA, 20 bp, synthetic construct
  source 1..20: mol_type = other DNA
ccgccacttgtcctgggcgc

SEQ ID NO: 2883 - DNA, 21 bp, synthetic construct
  source 1..21: mol_type = other DNA
ccgccacttgtcctgggcgct

SEQ ID NO: 2884 - DNA, 20 bp, synthetic construct
  source 1..20: mol_type = other DNA
cgccacttgtcctgggcgct

SEQ ID NO: 2885 - DNA, 21 bp, synthetic construct
  source 1..21: mol_type = other DNA
cgccacttgtcctgggcgctg

SEQ ID NO: 2886 - DNA, 20 bp, synthetic construct
  source 1..20: mol_type = other DNA
gccacttgtcctgggcgctg

SEQ ID NO: 2887 - DNA, 21 bp, synthetic construct
  source 1..21: mol_type = other DNA
gccacttgtcctgggcgctgc

SEQ ID NO: 2888 - DNA, 20 bp, synthetic construct
  source 1..20: mol_type = other DNA
ccacttgtcctgggcgctgc

SEQ ID NO: 2889 - DNA, 21 bp, synthetic construct
  source 1..21: mol_type = other DNA
ccacttgtcctgggcgctgcc

SEQ ID NO: 2890 - DNA, 20 bp, synthetic construct
  source 1..20: mol_type = other DNA
cacttgtcctgggcgctgcc

SEQ ID NO: 2891 - DNA, 21 bp, synthetic construct
  source 1..21: mol_type = other DNA
cacttgtcctgggcgctgcct

SEQ ID NO: 2892 - DNA, 20 bp, synthetic construct
  source 1..20: mol_type = other DNA
acttgtcctgggcgctgcct

SEQ ID NO: 2893 - DNA, 21 bp, synthetic construct
  source 1..21: mol_type = other DNA
acttgtcctgggcgctgcctc

SEQ ID NO: 2894 - DNA, 20 bp, synthetic construct
  source 1..20: mol_type = other DNA
cttgtcctgggcgctgcctc

SEQ ID NO: 2895 - DNA, 21 bp, synthetic construct
  source 1..21: mol_type = other DNA
cttgtcctgggcgctgcctca

SEQ ID NO: 2896 - DNA, 20 bp, synthetic construct
  source 1..20: mol_type = other DNA
ttgtcctgggcgctgcctca

SEQ ID NO: 2897 - DNA, 21 bp, synthetic construct
  source 1..21: mol_type = other DNA
ttgtcctgggcgctgcctcag

SEQ ID NO: 2898 - DNA, 20 bp, synthetic construct
  source 1..20: mol_type = other DNA
tgtcctgggcgctgcctcag

SEQ ID NO: 2899 - DNA, 21 bp, synthetic construct
  source 1..21: mol_type = other DNA
tgtcctgggcgctgcctcagt

SEQ ID NO: 2900 - DNA, 20 bp, synthetic construct
  source 1..20: mol_type = other DNA
gtcctgggcgctgcctcagt

SEQ ID NO: 2901 - DNA, 21 bp, synthetic construct
  source 1..21: mol_type = other DNA
gtcctgggcgctgcctcagta

SEQ ID NO: 2902 - DNA, 20 bp, synthetic construct
  source 1..20: mol_type = other DNA
tcctgggcgctgcctcagta

SEQ ID NO: 2903 - DNA, 21 bp, synthetic construct
  source 1..21: mol_type = other DNA
tcctgggcgctgcctcagtat

SEQ ID NO: 2904 - DNA, 20 bp, synthetic construct
  source 1..20: mol_type = other DNA
cctgggcgctgcctcagtat

SEQ ID NO: 2905 - DNA, 21 bp, synthetic construct
  source 1..21: mol_type = other DNA
cctgggcgctgcctcagtatc

SEQ ID NO: 2906 - DNA, 20 bp, synthetic construct
  source 1..20: mol_type = other DNA
ctgggcgctgcctcagtatc

SEQ ID NO: 2907 - DNA, 21 bp, synthetic construct
  source 1..21: mol_type = other DNA
ctgggcgctgcctcagtatcg

SEQ ID NO: 2908 - DNA, 20 bp, synthetic construct
  source 1..20: mol_type = other DNA
tgggcgctgcctcagtatcg

SEQ ID NO: 2909 - DNA, 21 bp, synthetic construct
  source 1..21: mol_type = other DNA
tgggcgctgcctcagtatcgc

SEQ ID NO: 2910 - DNA, 20 bp, synthetic construct
  source 1..20: mol_type = other DNA
gggcgctgcctcagtatcgc

SEQ ID NO: 2911 - DNA, 21 bp, synthetic construct
  source 1..21: mol_type = other DNA
gggcgctgcctcagtatcgct

SEQ ID NO: 2912 - DNA, 20 bp, synthetic construct
  source 1..20: mol_type = other DNA
ggcgctgcctcagtatcgct

SEQ ID NO: 2913 - DNA, 21 bp, synthetic construct
  source 1..21: mol_type = other DNA
ggcgctgcctcagtatcgcta

SEQ ID NO: 2914 - DNA, 20 bp, synthetic construct
  source 1..20: mol_type = other DNA
gcgctgcctcagtatcgcta

SEQ ID NO: 2915 - DNA, 21 bp, synthetic construct
  source 1..21: mol_type = other DNA
gcgctgcctcagtatcgctat

SEQ ID NO: 2916 - DNA, 20 bp, synthetic construct
  source 1..20: mol_type = other DNA
cgctgcctcagtatcgctat

SEQ ID NO: 2917 - DNA, 21 bp, synthetic construct
  source 1..21: mol_type = other DNA
cgctgcctcagtatcgctatc

SEQ ID NO: 2918 - DNA, 20 bp, synthetic construct
  source 1..20: mol_type = other DNA
gctgcctcagtatcgctatc

SEQ ID NO: 2919 - DNA, 21 bp, synthetic construct
  source 1..21: mol_type = other DNA
gctgcctcagtatcgctatca

SEQ ID NO: 2920 - DNA, 20 bp, synthetic construct
  source 1..20: mol_type = other DNA
ctgcctcagtatcgctatca

SEQ ID NO: 2921 - DNA, 21 bp, synthetic construct
  source 1..21: mol_type = other DNA
ctgcctcagtatcgctatcac

SEQ ID NO: 2922 - DNA, 20 bp, synthetic construct
  source 1..20: mol_type = other DNA
tgcctcagtatcgctatcac

SEQ ID NO: 2923 - DNA, 21 bp, synthetic construct
  source 1..21: mol_type = other DNA
tgcctcagtatcgctatcact

SEQ ID NO: 2924 - DNA, 20 bp, synthetic construct
  source 1..20: mol_type = other DNA
gcctcagtatcgctatcact

SEQ ID NO: 2925 - DNA, 21 bp, synthetic construct
  source 1..21: mol_type = other DNA
gcctcagtatcgctatcactt

SEQ ID NO: 2926 - DNA, 20 bp, synthetic construct
  source 1..20: mol_type = other DNA
cctcagtatcgctatcactt

SEQ ID NO: 2927 - DNA, 21 bp, synthetic construct
  source 1..21: mol_type = other DNA
cctcagtatcgctatcacttt

SEQ ID NO: 2928 - DNA, 20 bp, synthetic construct
  source 1..20: mol_type = other DNA
ctcagtatcgctatcacttt

SEQ ID NO: 2929 - DNA, 21 bp, synthetic construct
  source 1..21: mol_type = other DNA
ctcagtatcgctatcactttc

SEQ ID NO: 2930 - DNA, 20 bp, synthetic construct
  source 1..20: mol_type = other DNA
tcagtatcgctatcactttc

SEQ ID NO: 2931 - DNA, 21 bp, synthetic construct
  source 1..21: mol_type = other DNA
tcagtatcgctatcactttca

SEQ ID NO: 2932 - DNA, 20 bp, synthetic construct
  source 1..20: mol_type = other DNA
cagtatcgctatcactttca

SEQ ID NO: 2933 - DNA, 21 bp, synthetic construct
  source 1..21: mol_type = other DNA
cagtatcgctatcactttcat

SEQ ID NO: 2934 - DNA, 20 bp, synthetic construct
  source 1..20: mol_type = other DNA
agtatcgctatcactttcat

SEQ ID NO: 2935 - DNA, 21 bp, synthetic construct
  source 1..21: mol_type = other DNA
agtatcgctatcactttcatc

SEQ ID NO: 2936 - DNA, 20 bp, synthetic construct
  source 1..20: mol_type = other DNA
gtatcgctatcactttcatc

SEQ ID NO: 2937 - DNA, 21 bp, synthetic construct
  source 1..21: mol_type = other DNA
gtatcgctatcactttcatca

SEQ ID NO: 2938 - DNA, 20 bp, synthetic construct
  source 1..20: mol_type = other DNA
tatcgctatcactttcatca

SEQ ID NO: 2939 - DNA, 21 bp, synthetic construct
  source 1..21: mol_type = other DNA
tatcgctatcactttcatcat

SEQ ID NO: 2940 - DNA, 20 bp, synthetic construct
  source 1..20: mol_type = other DNA
atcgctatcactttcatcat

SEQ ID NO: 2941 - DNA, 21 bp, synthetic construct
  source 1..21: mol_type = other DNA
atcgctatcactttcatcatc

SEQ ID NO: 2942 - DNA, 20 bp, synthetic construct
  source 1..20: mol_type = other DNA
tcgctatcactttcatcatc

SEQ ID NO: 2943 - DNA, 21 bp, synthetic construct
  source 1..21: mol_type = other DNA
tcgctatcactttcatcatca

SEQ ID NO: 2944 - DNA, 20 bp, synthetic construct
  source 1..20: mol_type = other DNA
cgctatcactttcatcatca

SEQ ID NO: 2945 - DNA, 21 bp, synthetic construct
  source 1..21: mol_type = other DNA
cgctatcactttcatcatcat

SEQ ID NO: 2946 - DNA, 20 bp, synthetic construct
  source 1..20: mol_type = other DNA
gctatcactttcatcatcat

SEQ ID NO: 2947 - DNA, 21 bp, synthetic construct
  source 1..21: mol_type = other DNA
gctatcactttcatcatcata

SEQ ID NO: 2948 - DNA, 20 bp, synthetic construct
  source 1..20: mol_type = other DNA
ctatcactttcatcatcata

SEQ ID NO: 2949 - DNA, 21 bp, synthetic construct
  source 1..21: mol_type = other DNA
ctatcactttcatcatcataa

SEQ ID NO: 2950 - DNA, 20 bp, synthetic construct
  source 1..20: mol_type = other DNA
tatcactttcatcatcataa

SEQ ID NO: 2951 - DNA, 21 bp, synthetic construct
  source 1..21: mol_type = other DNA
tatcactttcatcatcataat

SEQ ID NO: 2952 - DNA, 20 bp, synthetic construct
  source 1..20: mol_type = other DNA
atcactttcatcatcataat

SEQ ID NO: 2953 - DNA, 21 bp, synthetic construct
  source 1..21: mol_type = other DNA
atcactttcatcatcataatt

SEQ ID NO: 2954 - DNA, 20 bp, synthetic construct
  source 1..20: mol_type = other DNA
tcactttcatcatcataatt

SEQ ID NO: 2955 - DNA, 21 bp, synthetic construct
  source 1..21: mol_type = other DNA
tcactttcatcatcataatta

SEQ ID NO: 2956 - DNA, 20 bp, synthetic construct
  source 1..20: mol_type = other DNA
cactttcatcatcataatta

SEQ ID NO: 2957 - DNA, 21 bp, synthetic construct
  source 1..21: mol_type = other DNA
cactttcatcatcataattat

SEQ ID NO: 2958 - DNA, 20 bp, synthetic construct
  source 1..20: mol_type = other DNA
actttcatcatcataattat

SEQ ID NO: 2959 - DNA, 21 bp, synthetic construct
  source 1..21: mol_type = other DNA
actttcatcatcataattata

SEQ ID NO: 2960 - DNA, 20 bp, synthetic construct
  source 1..20: mol_type = other DNA
ctttcatcatcataattata

SEQ ID NO: 2961 - DNA, 21 bp, synthetic construct
  source 1..21: mol_type = other DNA
ctttcatcatcataattataa

SEQ ID NO: 2962 - DNA, 20 bp, synthetic construct
  source 1..20: mol_type = other DNA
tttcatcatcataattataa

SEQ ID NO: 2963 - DNA, 21 bp, synthetic construct
  source 1..21: mol_type = other DNA
tttcatcatcataattataat

SEQ ID NO: 2964 - DNA, 20 bp, synthetic construct
  source 1..20: mol_type = other DNA
ttcatcatcataattataat

SEQ ID NO: 2965 - DNA, 21 bp, synthetic construct
  source 1..21: mol_type = other DNA
ttcatcatcataattataatc

SEQ ID NO: 2966 - DNA, 20 bp, synthetic construct
  source 1..20: mol_type = other DNA
tcatcatcataattataatc

SEQ ID NO: 2967 - DNA, 21 bp, synthetic construct
  source 1..21: mol_type = other DNA
tcatcatcataattataatcc

SEQ ID NO: 2968 - DNA, 20 bp, synthetic construct
  source 1..20: mol_type = other DNA
catcatcataattataatcc

SEQ ID NO: 2969 - DNA, 21 bp, synthetic construct
  source 1..21: mol_type = other DNA
catcatcataattataatccc

SEQ ID NO: 2970 - DNA, 20 bp, synthetic construct
  source 1..20: mol_type = other DNA
atcatcataattataatccc

SEQ ID NO: 2971 - DNA, 21 bp, synthetic construct
  source 1..21: mol_type = other DNA
atcatcataattataatccca

SEQ ID NO: 2972 - DNA, 20 bp, synthetic construct
  source 1..20: mol_type = other DNA
tcatcataattataatccca

SEQ ID NO: 2973 - DNA, 21 bp, synthetic construct
  source 1..21: mol_type = other DNA
tcatcataattataatcccac

SEQ ID NO: 2974 - DNA, 20 bp, synthetic construct
  source 1..20: mol_type = other DNA
catcataattataatcccac

SEQ ID NO: 2975 - DNA, 21 bp, synthetic construct
  source 1..21: mol_type = other DNA
catcataattataatcccaca

SEQ ID NO: 2976 - DNA, 20 bp, synthetic construct
  source 1..20: mol_type = other DNA
atcataattataatcccaca

SEQ ID NO: 2977 - DNA, 21 bp, synthetic construct
  source 1..21: mol_type = other DNA
atcataattataatcccacac

SEQ ID NO: 2978 - DNA, 20 bp, synthetic construct
  source 1..20: mol_type = other DNA
tcataattataatcccacac

SEQ ID NO: 2979 - DNA, 21 bp, synthetic construct
  source 1..21: mol_type = other DNA
tcataattataatcccacact

SEQ ID NO: 2980 - DNA, 20 bp, synthetic construct
  source 1..20: mol_type = other DNA
cataattataatcccacact

SEQ ID NO: 2981 - DNA, 21 bp, synthetic construct
  source 1..21: mol_type = other DNA
cataattataatcccacactt

SEQ ID NO: 2982 - DNA, 20 bp, synthetic construct
  source 1..20: mol_type = other DNA
ataattataatcccacactt

SEQ ID NO: 2983 - DNA, 21 bp, synthetic construct
  source 1..21: mol_type = other DNA
ataattataatcccacacttt

SEQ ID NO: 2984 - DNA, 20 bp, synthetic construct
  source 1..20: mol_type = other DNA
taattataatcccacacttt

SEQ ID NO: 2985 - DNA, 21 bp, synthetic construct
  source 1..21: mol_type = other DNA
taattataatcccacactttc

SEQ ID NO: 2986 - DNA, 20 bp, synthetic construct
  source 1..20: mol_type = other DNA
aattataatcccacactttc

SEQ ID NO: 2987 - DNA, 21 bp, synthetic construct
  source 1..21: mol_type = other DNA
aattataatcccacactttct

SEQ ID NO: 2988 - DNA, 20 bp, synthetic construct
  source 1..20: mol_type = other DNA
attataatcccacactttct

SEQ ID NO: 2989 - DNA, 21 bp, synthetic construct
  source 1..21: mol_type = other DNA
attataatcccacactttctt

SEQ ID NO: 2990 - DNA, 20 bp, synthetic construct
  source 1..20: mol_type = other DNA
ttataatcccacactttctt

SEQ ID NO: 2991 - DNA, 21 bp, synthetic construct
  source 1..21: mol_type = other DNA
ttataatcccacactttcttc

SEQ ID NO: 2992 - DNA, 20 bp, synthetic construct
  source 1..20: mol_type = other DNA
tataatcccacactttcttc

SEQ ID NO: 2993 - DNA, 21 bp, synthetic construct
  source 1..21: mol_type = other DNA
tataatcccacactttcttct

SEQ ID NO: 2994 - DNA, 20 bp, synthetic construct
  source 1..20: mol_type = other DNA
ataatcccacactttcttct

SEQ ID NO: 2995 - DNA, 21 bp, synthetic construct
  source 1..21: mol_type = other DNA
ataatcccacactttcttctt

SEQ ID NO: 2996 - DNA, 20 bp, synthetic construct
  source 1..20: mol_type = other DNA
taatcccacactttcttctt

SEQ ID NO: 2997 - DNA, 21 bp, synthetic construct
  source 1..21: mol_type = other DNA
taatcccacactttcttcttt

SEQ ID NO: 2998 - DNA, 20 bp, synthetic construct
  source 1..20: mol_type = other DNA
aatcccacactttcttcttt

SEQ ID NO: 2999 - DNA, 21 bp, synthetic construct
  source 1..21: mol_type = other DNA
aatcccacactttcttctttc

SEQ ID NO: 3000 - DNA, 20 bp, synthetic construct
  source 1..20: mol_type = other DNA
atcccacactttcttctttc

SEQ ID NO: 3001 - DNA, 21 bp, synthetic construct
  source 1..21: mol_type = other DNA
atcccacactttcttctttct

SEQ ID NO: 3002 - DNA, 20 bp, synthetic construct
  source 1..20: mol_type = other DNA
tcccacactttcttctttct

SEQ ID NO: 3003 - DNA, 21 bp, synthetic construct
  source 1..21: mol_type = other DNA
tcccacactttcttctttctg

SEQ ID NO: 3004 - DNA, 20 bp, synthetic construct
  source 1..20: mol_type = other DNA
cccacactttcttctttctg

SEQ ID NO: 3005 - DNA, 21 bp, synthetic construct
  source 1..21: mol_type = other DNA
cccacactttcttctttctgt

SEQ ID NO: 3006 - DNA, 20 bp, synthetic construct
  source 1..20: mol_type = other DNA
ccacactttcttctttctgt

SEQ ID NO: 3007 - DNA, 21 bp, synthetic construct
  source 1..21: mol_type = other DNA
ccacactttcttctttctgtt

SEQ ID NO: 3008 - DNA, 20 bp, synthetic construct
  source 1..20: mol_type = other DNA
cacactttcttctttctgtt

SEQ ID NO: 3009 - DNA, 21 bp, synthetic construct
  source 1..21: mol_type = other DNA
cacactttcttctttctgttg

SEQ ID NO: 3010 - DNA, 20 bp, synthetic construct
  source 1..20: mol_type = other DNA
acactttcttctttctgttg

SEQ ID NO: 3011 - DNA, 21 bp, synthetic construct
  source 1..21: mol_type = other DNA
acactttcttctttctgttga

SEQ ID NO: 3012 - DNA, 20 bp, synthetic construct
  source 1..20: mol_type = other DNA
cactttcttctttctgttga

SEQ ID NO: 3013 - DNA, 21 bp, synthetic construct
  source 1..21: mol_type = other DNA
cactttcttctttctgttgat

SEQ ID NO: 3014 - DNA, 20 bp, synthetic construct
  source 1..20: mol_type = other DNA
actttcttctttctgttgat

SEQ ID NO: 3015 - DNA, 21 bp, synthetic construct
  source 1..21: mol_type = other DNA
actttcttctttctgttgatg

SEQ ID NO: 3016 - DNA, 20 bp, synthetic construct
  source 1..20: mol_type = other DNA
ctttcttctttctgttgatg

SEQ ID NO: 3017 - DNA, 21 bp, synthetic construct
  source 1..21: mol_type = other DNA
ctttcttctttctgttgatgt

SEQ ID NO: 3018 - DNA, 20 bp, synthetic construct
  source 1..20: mol_type = other DNA
tttcttctttctgttgatgt

SEQ ID NO: 3019 - DNA, 21 bp, synthetic construct
  source 1..21: mol_type = other DNA
tttcttctttctgttgatgta

SEQ ID NO: 3020 - DNA, 20 bp, synthetic construct
  source 1..20: mol_type = other DNA
ttcttctttctgttgatgta

SEQ ID NO: 3021 - DNA, 21 bp, synthetic construct
  source 1..21: mol_type = other DNA
ttcttctttctgttgatgtaa

SEQ ID NO: 3022 - DNA, 20 bp, synthetic construct
  source 1..20: mol_type = other DNA
tcttctttctgttgatgtaa

SEQ ID NO: 3023 - DNA, 21 bp, synthetic construct
  source 1..21: mol_type = other DNA
tcttctttctgttgatgtaaa

SEQ ID NO: 3024 - DNA, 20 bp, synthetic construct
  source 1..20: mol_type = other DNA
cttctttctgttgatgtaaa

SEQ ID NO: 3025 - DNA, 21 bp, synthetic construct
  source 1..21: mol_type = other DNA
cttctttctgttgatgtaaat

SEQ ID NO: 3026 - DNA, 20 bp, synthetic construct
  source 1..20: mol_type = other DNA
ttctttctgttgatgtaaat

SEQ ID NO: 3027 - DNA, 21 bp, synthetic construct
  source 1..21: mol_type = other DNA
ttctttctgttgatgtaaatg

SEQ ID NO: 3028 - DNA, 20 bp, synthetic construct
  source 1..20: mol_type = other DNA
tctttctgttgatgtaaatg

SEQ ID NO: 3029 - DNA, 21 bp, synthetic construct
  source 1..21: mol_type = other DNA
tctttctgttgatgtaaatga

SEQ ID NO: 3030 - DNA, 20 bp, synthetic construct
  source 1..20: mol_type = other DNA
ctttctgttgatgtaaatga

SEQ ID NO: 3031 - DNA, 21 bp, synthetic construct
  source 1..21: mol_type = other DNA
ctttctgttgatgtaaatgac

SEQ ID NO: 3032 - DNA, 20 bp, synthetic construct
  source 1..20: mol_type = other DNA
tttctgttgatgtaaatgac

SEQ ID NO: 3033 - DNA, 21 bp, synthetic construct
  source 1..21: mol_type = other DNA
tttctgttgatgtaaatgacc

SEQ ID NO: 3034 - DNA, 20 bp, synthetic construct
  source 1..20: mol_type = other DNA
ttctgttgatgtaaatgacc

SEQ ID NO: 3035 - DNA, 21 bp, synthetic construct
  source 1..21: mol_type = other DNA
ttctgttgatgtaaatgacct

SEQ ID NO: 3036 - DNA, 20 bp, synthetic construct
  source 1..20: mol_type = other DNA
tctgttgatgtaaatgacct

SEQ ID NO: 3037 - DNA, 21 bp, synthetic construct
  source 1..21: mol_type = other DNA
tctgttgatgtaaatgacctc

SEQ ID NO: 3038 - DNA, 20 bp, synthetic construct
  source 1..20: mol_type = other DNA
ctgttgatgtaaatgacctc

SEQ ID NO: 3039 - DNA, 21 bp, synthetic construct
  source 1..21: mol_type = other DNA
ctgttgatgtaaatgacctcc

SEQ ID NO: 3040 - DNA, 20 bp, synthetic construct
  source 1..20: mol_type = other DNA
tgttgatgtaaatgacctcc

SEQ ID NO: 3041 - DNA, 21 bp, synthetic construct
  source 1..21: mol_type = other DNA
tgttgatgtaaatgacctcca

SEQ ID NO: 3042 - DNA, 20 bp, synthetic construct
  source 1..20: mol_type = other DNA
gttgatgtaaatgacctcca

SEQ ID NO: 3043 - DNA, 21 bp, synthetic construct
  source 1..21: mol_type = other DNA
gttgatgtaaatgacctccac

SEQ ID NO: 3044 - DNA, 20 bp, synthetic construct
  source 1..20: mol_type = other DNA
ttgatgtaaatgacctccac

SEQ ID NO: 3045 - DNA, 21 bp, synthetic construct
  source 1..21: mol_type = other DNA
ttgatgtaaatgacctccacc

SEQ ID NO: 3046 - DNA, 20 bp, synthetic construct
  source 1..20: mol_type = other DNA
tgatgtaaatgacctccacc

SEQ ID NO: 3047 - DNA, 21 bp, synthetic construct
  source 1..21: mol_type = other DNA
tgatgtaaatgacctccacca

SEQ ID NO: 3048 - DNA, 20 bp, synthetic construct
  source 1..20: mol_type = other DNA
gatgtaaatgacctccacca

SEQ ID NO: 3049 - DNA, 21 bp, synthetic construct
  source 1..21: mol_type = other DNA
gatgtaaatgacctccaccat

SEQ ID NO: 3050 - DNA, 20 bp, synthetic construct
  source 1..20: mol_type = other DNA
atgtaaatgacctccaccat

SEQ ID NO: 3051 - DNA, 21 bp, synthetic construct
  source 1..21: mol_type = other DNA
atgtaaatgacctccaccata

SEQ ID NO: 3052 - DNA, 20 bp, synthetic construct
  source 1..20: mol_type = other DNA
tgtaaatgacctccaccata

SEQ ID NO: 3053 - DNA, 21 bp, synthetic construct
  source 1..21: mol_type = other DNA
tgtaaatgacctccaccatat

SEQ ID NO: 3054 - DNA, 20 bp, synthetic construct
  source 1..20: mol_type = other DNA
gtaaatgacctccaccatat

SEQ ID NO: 3055 - DNA, 21 bp, synthetic construct
  source 1..21: mol_type = other DNA
gtaaatgacctccaccatatc

SEQ ID NO: 3056 - DNA, 20 bp, synthetic construct
  source 1..20: mol_type = other DNA
taaatgacctccaccatatc

SEQ ID NO: 3057 - DNA, 21 bp, synthetic construct
  source 1..21: mol_type = other DNA
taaatgacctccaccatatcc

SEQ ID NO: 3058 - DNA, 20 bp, synthetic construct
  source 1..20: mol_type = other DNA
aaatgacctccaccatatcc

SEQ ID NO: 3059 - DNA, 21 bp, synthetic construct
  source 1..21: mol_type = other DNA
aaatgacctccaccatatcca

SEQ ID NO: 3060 - DNA, 20 bp, synthetic construct
  source 1..20: mol_type = other DNA
aatgacctccaccatatcca

SEQ ID NO: 3061 - DNA, 21 bp, synthetic construct
  source 1..21: mol_type = other DNA
aatgacctccaccatatccat

SEQ ID NO: 3062 - DNA, 20 bp, synthetic construct
  source 1..20: mol_type = other DNA
atgacctccaccatatccat

SEQ ID NO: 3063 - DNA, 21 bp, synthetic construct
  source 1..21: mol_type = other DNA
atgacctccaccatatccatg

SEQ ID NO: 3064 - DNA, 20 bp, synthetic construct
  source 1..20: mol_type = other DNA
tgacctccaccatatccatg

SEQ ID NO: 3065 - DNA, 21 bp, synthetic construct
  source 1..21: mol_type = other DNA
tgacctccaccatatccatgg

SEQ ID NO: 3066 - DNA, 20 bp, synthetic construct
  source 1..20: mol_type = other DNA
gacctccaccatatccatgg

SEQ ID NO: 3067 - DNA, 21 bp, synthetic construct
  source 1..21: mol_type = other DNA
gacctccaccatatccatggc

SEQ ID NO: 3068 - DNA, 20 bp, synthetic construct
  source 1..20: mol_type = other DNA
acctccaccatatccatggc

SEQ ID NO: 3069 - DNA, 21 bp, synthetic construct
  source 1..21: mol_type = other DNA
acctccaccatatccatggct

SEQ ID NO: 3070 - DNA, 20 bp, synthetic construct
  source 1..20: mol_type = other DNA
cctccaccatatccatggct

SEQ ID NO: 3071 - DNA, 21 bp, synthetic construct
  source 1..21: mol_type = other DNA
cctccaccatatccatggctt

SEQ ID NO: 3072 - DNA, 20 bp, synthetic construct
  source 1..20: mol_type = other DNA
ctccaccatatccatggctt

SEQ ID NO: 3073 - DNA, 21 bp, synthetic construct
  source 1..21: mol_type = other DNA
ctccaccatatccatggcttc

SEQ ID NO: 3074 - DNA, 20 bp, synthetic construct
  source 1..20: mol_type = other DNA
tccaccatatccatggcttc

SEQ ID NO: 3075 - DNA, 21 bp, synthetic construct
  source 1..21: mol_type = other DNA
tccaccatatccatggcttcc

SEQ ID NO: 3076 - DNA, 20 bp, synthetic construct
  source 1..20: mol_type = other DNA
ccaccatatccatggcttcc

SEQ ID NO: 3077 - DNA, 21 bp, synthetic construct
  source 1..21: mol_type = other DNA
ccaccatatccatggcttcca

SEQ ID NO: 3078 - DNA, 20 bp, synthetic construct
  source 1..20: mol_type = other DNA
caccatatccatggcttcca

SEQ ID NO: 3079 - DNA, 21 bp, synthetic construct
  source 1..21: mol_type = other DNA
caccatatccatggcttccaa

SEQ ID NO: 3080 - DNA, 20 bp, synthetic construct
  source 1..20: mol_type = other DNA
accatatccatggcttccaa

SEQ ID NO: 3081 - DNA, 21 bp, synthetic construct
  source 1..21: mol_type = other DNA
accatatccatggcttccaac

SEQ ID NO: 3082 - DNA, 20 bp, synthetic construct
  source 1..20: mol_type = other DNA
ccatatccatggcttccaac

SEQ ID NO: 3083 - DNA, 21 bp, synthetic construct
  source 1..21: mol_type = other DNA
ccatatccatggcttccaacg

SEQ ID NO: 3084 - DNA, 20 bp, synthetic construct
  source 1..20: mol_type = other DNA
catatccatggcttccaacg

SEQ ID NO: 3085 - DNA, 21 bp, synthetic construct
  source 1..21: mol_type = other DNA
catatccatggcttccaacgg

SEQ ID NO: 3086 - DNA, 20 bp, synthetic construct
  source 1..20: mol_type = other DNA
atatccatggcttccaacgg

SEQ ID NO: 3087 - DNA, 21 bp, synthetic construct
  source 1..21: mol_type = other DNA
atatccatggcttccaacggt

SEQ ID NO: 3088 - DNA, 20 bp, synthetic construct
  source 1..20: mol_type = other DNA
tatccatggcttccaacggt

SEQ ID NO: 3089 - DNA, 21 bp, synthetic construct
  source 1..21: mol_type = other DNA
tatccatggcttccaacggtg

SEQ ID NO: 3090 - DNA, 20 bp, synthetic construct
  source 1..20: mol_type = other DNA
atccatggcttccaacggtg

SEQ ID NO: 3091 - DNA, 21 bp, synthetic construct
  source 1..21: mol_type = other DNA
atccatggcttccaacggtgg

SEQ ID NO: 3092 - DNA, 20 bp, synthetic construct
  source 1..20: mol_type = other DNA
tccatggcttccaacggtgg

SEQ ID NO: 3093 - DNA, 21 bp, synthetic construct
  source 1..21: mol_type = other DNA
tccatggcttccaacggtggc

SEQ ID NO: 3094 - DNA, 20 bp, synthetic construct
  source 1..20: mol_type = other DNA
ccatggcttccaacggtggc

SEQ ID NO: 3095 - DNA, 21 bp, synthetic construct
  source 1..21: mol_type = other DNA
ccatggcttccaacggtggca

SEQ ID NO: 3096 - DNA, 20 bp, synthetic construct
  source 1..20: mol_type = other DNA
catggcttccaacggtggca

SEQ ID NO: 3097 - DNA, 21 bp, synthetic construct
  source 1..21: mol_type = other DNA
catggcttccaacggtggcag

SEQ ID NO: 3098 - DNA, 20 bp, synthetic construct
  source 1..20: mol_type = other DNA
atggcttccaacggtggcag

SEQ ID NO: 3099 - DNA, 21 bp, synthetic construct
  source 1..21: mol_type = other DNA
atggcttccaacggtggcagg

SEQ ID NO: 3100 - DNA, 20 bp, synthetic construct
  source 1..20: mol_type = other DNA
tggcttccaacggtggcagg

SEQ ID NO: 3101 - DNA, 21 bp, synthetic construct
  source 1..21: mol_type = other DNA
tggcttccaacggtggcaggt

SEQ ID NO: 3102 - DNA, 20 bp, synthetic construct
  source 1..20: mol_type = other DNA
ggcttccaacggtggcaggt

SEQ ID NO: 3103 - DNA, 21 bp, synthetic construct
  source 1..21: mol_type = other DNA
ggcttccaacggtggcaggtt

SEQ ID NO: 3104 - DNA, 20 bp, synthetic construct
  source 1..20: mol_type = other DNA
gcttccaacggtggcaggtt

SEQ ID NO: 3105 - DNA, 21 bp, synthetic construct
  source 1..21: mol_type = other DNA
gcttccaacggtggcaggtta

SEQ ID NO: 3106 - DNA, 20 bp, synthetic construct
  source 1..20: mol_type = other DNA
cttccaacggtggcaggtta

SEQ ID NO: 3107 - DNA, 21 bp, synthetic construct
  source 1..21: mol_type = other DNA
cttccaacggtggcaggttag

SEQ ID NO: 3108 - DNA, 20 bp, synthetic construct
  source 1..20: mol_type = other DNA
ttccaacggtggcaggttag

SEQ ID NO: 3109 - DNA, 21 bp, synthetic construct
  source 1..21: mol_type = other DNA
ttccaacggtggcaggttagg

SEQ ID NO: 3110 - DNA, 20 bp, synthetic construct
  source 1..20: mol_type = other DNA
tccaacggtggcaggttagg

SEQ ID NO: 3111 - DNA, 21 bp, synthetic construct
  source 1..21: mol_type = other DNA
tccaacggtggcaggttagga

SEQ ID NO: 3112 - DNA, 20 bp, synthetic construct
  source 1..20: mol_type = other DNA
ccaacggtggcaggttagga

SEQ ID NO: 3113 - DNA, 21 bp, synthetic construct
  source 1..21: mol_type = other DNA
ccaacggtggcaggttaggaa

SEQ ID NO: 3114 - DNA, 20 bp, synthetic construct
  source 1..20: mol_type = other DNA
caacggtggcaggttaggaa

SEQ ID NO: 3115 - DNA, 21 bp, synthetic construct
  source 1..21: mol_type = other DNA
caacggtggcaggttaggaaa

SEQ ID NO: 3116 - DNA, 20 bp, synthetic construct
  source 1..20: mol_type = other DNA
aacggtggcaggttaggaaa

SEQ ID NO: 3117 - DNA, 21 bp, synthetic construct
  source 1..21: mol_type = other DNA
aacggtggcaggttaggaaat

SEQ ID NO: 3118 - DNA, 20 bp, synthetic construct
  source 1..20: mol_type = other DNA
acggtggcaggttaggaaat

SEQ ID NO: 3119 - DNA, 21 bp, synthetic construct
  source 1..21: mol_type = other DNA
acggtggcaggttaggaaatg

SEQ ID NO: 3120 - DNA, 20 bp, synthetic construct
  source 1..20: mol_type = other DNA
cggtggcaggttaggaaatg

SEQ ID NO: 3121 - DNA, 21 bp, synthetic construct
  source 1..21: mol_type = other DNA
cggtggcaggttaggaaatgg

SEQ ID NO: 3122 - DNA, 20 bp, synthetic construct
  source 1..20: mol_type = other DNA
ggtggcaggttaggaaatgg

SEQ ID NO: 3123 - DNA, 21 bp, synthetic construct
  source 1..21: mol_type = other DNA
ggtggcaggttaggaaatggc

SEQ ID NO: 3124 - DNA, 20 bp, synthetic construct
  source 1..20: mol_type = other DNA
gtggcaggttaggaaatggc

SEQ ID NO: 3125 - DNA, 21 bp, synthetic construct
  source 1..21: mol_type = other DNA
gtggcaggttaggaaatggcc

SEQ ID NO: 3126 - DNA, 20 bp, synthetic construct
  source 1..20: mol_type = other DNA
tggcaggttaggaaatggcc

SEQ ID NO: 3127 - DNA, 21 bp, synthetic construct
  source 1..21: mol_type = other DNA
tggcaggttaggaaatggcca

SEQ ID NO: 3128 - DNA, 20 bp, synthetic construct
  source 1..20: mol_type = other DNA
ggcaggttaggaaatggcca

SEQ ID NO: 3129 - DNA, 21 bp, synthetic construct
  source 1..21: mol_type = other DNA
ggcaggttaggaaatggccag

SEQ ID NO: 3130 - DNA, 20 bp, synthetic construct
  source 1..20: mol_type = other DNA
gcaggttaggaaatggccag

SEQ ID NO: 3131 - DNA, 21 bp, synthetic construct
  source 1..21: mol_type = other DNA
gcaggttaggaaatggccagg

SEQ ID NO: 3132 - DNA, 20 bp, synthetic construct
  source 1..20: mol_type = other DNA
caggttaggaaatggccagg

SEQ ID NO: 3133 - DNA, 21 bp, synthetic construct
  source 1..21: mol_type = other DNA
caggttaggaaatggccaggc

SEQ ID NO: 3134 - DNA, 20 bp, synthetic construct
  source 1..20: mol_type = other DNA
aggttaggaaatggccaggc

SEQ ID NO: 3135 - DNA, 21 bp, synthetic construct
  source 1..21: mol_type = other DNA
aggttaggaaatggccaggct

SEQ ID NO: 3136 - DNA, 20 bp, synthetic construct
  source 1..20: mol_type = other DNA
ggttaggaaatggccaggct

SEQ ID NO: 3137 - DNA, 21 bp, synthetic construct
  source 1..21: mol_type = other DNA
ggttaggaaatggccaggcta

SEQ ID NO: 3138 - DNA, 20 bp, synthetic construct
  source 1..20: mol_type = other DNA
gttaggaaatggccaggcta

SEQ ID NO: 3139 - DNA, 21 bp, synthetic construct
  source 1..21: mol_type = other DNA
gttaggaaatggccaggctaa

SEQ ID NO: 3140 - DNA, 20 bp, synthetic construct
  source 1..20: mol_type = other DNA
ttaggaaatggccaggctaa

SEQ ID NO: 3141 - DNA, 21 bp, synthetic construct
  source 1..21: mol_type = other DNA
ttaggaaatggccaggctaaa

SEQ ID NO: 3142 - DNA, 20 bp, synthetic construct
  source 1..20: mol_type = other DNA
taggaaatggccaggctaaa

SEQ ID NO: 3143 - DNA, 21 bp, synthetic construct
  source 1..21: mol_type = other DNA
taggaaatggccaggctaaaa

SEQ ID NO: 3144 - DNA, 20 bp, synthetic construct
  source 1..20: mol_type = other DNA
aggaaatggccaggctaaaa

SEQ ID NO: 3145 - DNA, 21 bp, synthetic construct
  source 1..21: mol_type = other DNA
aggaaatggccaggctaaaaa

SEQ ID NO: 3146 - DNA, 20 bp, synthetic construct
  source 1..20: mol_type = other DNA
ggaaatggccaggctaaaaa

SEQ ID NO: 3147 - DNA, 21 bp, synthetic construct
  source 1..21: mol_type = other DNA
ggaaatggccaggctaaaaag

SEQ ID NO: 3148 - DNA, 20 bp, synthetic construct
  source 1..20: mol_type = other DNA
gaaatggccaggctaaaaag

SEQ ID NO: 3149 - DNA, 21 bp, synthetic construct
  source 1..21: mol_type = other DNA
gaaatggccaggctaaaaagt

SEQ ID NO: 3150 - DNA, 20 bp, synthetic construct
  source 1..20: mol_type = other DNA
aaatggccaggctaaaaagt

SEQ ID NO: 3151 - DNA, 21 bp, synthetic construct
  source 1..21: mol_type = other DNA
aaatggccaggctaaaaagtt

SEQ ID NO: 3152 - DNA, 20 bp, synthetic construct
  source 1..20: mol_type = other DNA
aatggccaggctaaaaagtt

SEQ ID NO: 3153 - DNA, 21 bp, synthetic construct
  source 1..21: mol_type = other DNA
aatggccaggctaaaaagtta

SEQ ID NO: 3154 - DNA, 20 bp, synthetic construct
  source 1..20: mol_type = other DNA
atggccaggctaaaaagtta

SEQ ID NO: 3155 - DNA, 21 bp, synthetic construct
  source 1..21: mol_type = other DNA
atggccaggctaaaaagttat

SEQ ID NO: 3156 - DNA, 20 bp, synthetic construct
  source 1..20: mol_type = other DNA
tggccaggctaaaaagttat

SEQ ID NO: 3157 - DNA, 21 bp, synthetic construct
  source 1..21: mol_type = other DNA
tggccaggctaaaaagttatg

SEQ ID NO: 3158 - DNA, 20 bp, synthetic construct
  source 1..20: mol_type = other DNA
ggccaggctaaaaagttatg

SEQ ID NO: 3159 - DNA, 21 bp, synthetic construct
  source 1..21: mol_type = other DNA
ggccaggctaaaaagttatga

SEQ ID NO: 3160 - DNA, 20 bp, synthetic construct
  source 1..20: mol_type = other DNA
gccaggctaaaaagttatga

SEQ ID NO: 3161 - DNA, 21 bp, synthetic construct
  source 1..21: mol_type = other DNA
gccaggctaaaaagttatgaa

SEQ ID NO: 3162 - DNA, 20 bp, synthetic construct
  source 1..20: mol_type = other DNA
ccaggctaaaaagttatgaa

SEQ ID NO: 3163 - DNA, 21 bp, synthetic construct
  source 1..21: mol_type = other DNA
ccaggctaaaaagttatgaaa

SEQ ID NO: 3164 - DNA, 20 bp, synthetic construct
  source 1..20: mol_type = other DNA
caggctaaaaagttatgaaa

SEQ ID NO: 3165 - DNA, 21 bp, synthetic construct
  source 1..21: mol_type = other DNA
caggctaaaaagttatgaaaa

SEQ ID NO: 3166 - DNA, 20 bp, synthetic construct
  source 1..20: mol_type = other DNA
aggctaaaaagttatgaaaa

SEQ ID NO: 3167 - DNA, 21 bp, synthetic construct
  source 1..21: mol_type = other DNA
aggctaaaaagttatgaaaat

SEQ ID NO: 3168 - DNA, 20 bp, synthetic construct
  source 1..20: mol_type = other DNA
ggctaaaaagttatgaaaat

SEQ ID NO: 3169 - DNA, 21 bp, synthetic construct
  source 1..21: mol_type = other DNA
ggctaaaaagttatgaaaatt

SEQ ID NO: 3170 - DNA, 20 bp, synthetic construct
  source 1..20: mol_type = other DNA
gctaaaaagttatgaaaatt

SEQ ID NO: 3171 - DNA, 21 bp, synthetic construct
  source 1..21: mol_type = other DNA
gctaaaaagttatgaaaattc

SEQ ID NO: 3172 - DNA, 20 bp, synthetic construct
  source 1..20: mol_type = other DNA
ctaaaaagttatgaaaattc

SEQ ID NO: 3173 - DNA, 21 bp, synthetic construct
  source 1..21: mol_type = other DNA
ctaaaaagttatgaaaattca

SEQ ID NO: 3174 - DNA, 20 bp, synthetic construct
  source 1..20: mol_type = other DNA
taaaaagttatgaaaattca

SEQ ID NO: 3175 - DNA, 21 bp, synthetic construct
  source 1..21: mol_type = other DNA
taaaaagttatgaaaattcaa

SEQ ID NO: 3176 - DNA, 20 bp, synthetic construct
  source 1..20: mol_type = other DNA
aaaaagttatgaaaattcaa

SEQ ID NO: 3177 - DNA, 21 bp, synthetic construct
  source 1..21: mol_type = other DNA
aaaaagttatgaaaattcaag

SEQ ID NO: 3178 - DNA, 20 bp, synthetic construct
  source 1..20: mol_type = other DNA
aaaagttatgaaaattcaag

SEQ ID NO: 3179 - DNA, 21 bp, synthetic construct
  source 1..21: mol_type = other DNA
aaaagttatgaaaattcaaga

SEQ ID NO: 3180 - DNA, 20 bp, synthetic construct
  source 1..20: mol_type = other DNA
aaagttatgaaaattcaaga

SEQ ID NO: 3181 - DNA, 21 bp, synthetic construct
  source 1..21: mol_type = other DNA
aaagttatgaaaattcaagac

SEQ ID NO: 3182 - DNA, 20 bp, synthetic construct
  source 1..20: mol_type = other DNA
aagttatgaaaattcaagac

SEQ ID NO: 3183 - DNA, 21 bp, synthetic construct
  source 1..21: mol_type = other DNA
aagttatgaaaattcaagact

SEQ ID NO: 3184 - DNA, 20 bp, synthetic construct
  source 1..20: mol_type = other DNA
agttatgaaaattcaagact

SEQ ID NO: 3185 - DNA, 21 bp, synthetic construct
  source 1..21: mol_type = other DNA
agttatgaaaattcaagactt

SEQ ID NO: 3186 - DNA, 20 bp, synthetic construct
  source 1..20: mol_type = other DNA
gttatgaaaattcaagactt

SEQ ID NO: 3187 - DNA, 21 bp, synthetic construct
  source 1..21: mol_type = other DNA
gttatgaaaattcaagacttt

SEQ ID NO: 3188 - DNA, 20 bp, synthetic construct
  source 1..20: mol_type = other DNA
ttatgaaaattcaagacttt

SEQ ID NO: 3189 - DNA, 21 bp, synthetic construct
  source 1..21: mol_type = other DNA
ttatgaaaattcaagactttg

SEQ ID NO: 3190 - DNA, 20 bp, synthetic construct
  source 1..20: mol_type = other DNA
tatgaaaattcaagactttg

SEQ ID NO: 3191 - DNA, 21 bp, synthetic construct
  source 1..21: mol_type = other DNA
tatgaaaattcaagactttgg

SEQ ID NO: 3192 - DNA, 20 bp, synthetic construct
  source 1..20: mol_type = other DNA
atgaaaattcaagactttgg

SEQ ID NO: 3193 - DNA, 21 bp, synthetic construct
  source 1..21: mol_type = other DNA
atgaaaattcaagactttggg

SEQ ID NO: 3194 - DNA, 20 bp, synthetic construct
  source 1..20: mol_type = other DNA
tgaaaattcaagactttggg

SEQ ID NO: 3195 - DNA, 21 bp, synthetic construct
  source 1..21: mol_type = other DNA
tgaaaattcaagactttgggg

SEQ ID NO: 3196 - DNA, 20 bp, synthetic construct
  source 1..20: mol_type = other DNA
gaaaattcaagactttgggg

SEQ ID NO: 3197 - DNA, 21 bp, synthetic construct
  source 1..21: mol_type = other DNA
gaaaattcaagactttgggga

SEQ ID NO: 3198 - DNA, 20 bp, synthetic construct
  source 1..20: mol_type = other DNA
aaaattcaagactttgggga

SEQ ID NO: 3199 - DNA, 21 bp, synthetic construct
  source 1..21: mol_type = other DNA
aaaattcaagactttggggag

SEQ ID NO: 3200 - DNA, 20 bp, synthetic construct
  source 1..20: mol_type = other DNA
aaattcaagactttggggag

SEQ ID NO: 3201 - DNA, 20 bp, synthetic construct
  source 1..20: mol_type = other DNA
tctacataataaaacttaat

SEQ ID NO: 3202 - DNA, 21 bp, synthetic construct
  source 1..21: mol_type = other DNA
tctacataataaaacttaatc

SEQ ID NO: 3203 - DNA, 20 bp, synthetic construct
  source 1..20: mol_type = other DNA
ctacataataaaacttaatc

SEQ ID NO: 3204 - DNA, 21 bp, synthetic construct
  source 1..21: mol_type = other DNA
ctacataataaaacttaatca

SEQ ID NO: 3205 - DNA, 20 bp, synthetic construct
  source 1..20: mol_type = other DNA
tacataataaaacttaatca

SEQ ID NO: 3206 - DNA, 21 bp, synthetic construct
  source 1..21: mol_type = other DNA
tacataataaaacttaatcac

SEQ ID NO: 3207 - DNA, 20 bp, synthetic construct
  source 1..20: mol_type = other DNA
acataataaaacttaatcac

SEQ ID NO: 3208 - DNA, 21 bp, synthetic construct
  source 1..21: mol_type = other DNA
acataataaaacttaatcact

SEQ ID NO: 3209 - DNA, 20 bp, synthetic construct
  source 1..20: mol_type = other DNA
cataataaaacttaatcact

SEQ ID NO: 3210 - DNA, 21 bp, synthetic construct
  source 1..21: mol_type = other DNA
cataataaaacttaatcactg

SEQ ID NO: 3211 - DNA, 20 bp, synthetic construct
  source 1..20: mol_type = other DNA
ataataaaacttaatcactg

SEQ ID NO: 3212 - DNA, 21 bp, synthetic construct
  source 1..21: mol_type = other DNA
ataataaaacttaatcactgg

SEQ ID NO: 3213 - DNA, 20 bp, synthetic construct
  source 1..20: mol_type = other DNA
taataaaacttaatcactgg

SEQ ID NO: 3214 - DNA, 21 bp, synthetic construct
  source 1..21: mol_type = other DNA
taataaaacttaatcactggg

SEQ ID NO: 3215 - DNA, 20 bp, synthetic construct
  source 1..20: mol_type = other DNA
aataaaacttaatcactggg

SEQ ID NO: 3216 - DNA, 21 bp, synthetic construct
  source 1..21: mol_type = other DNA
aataaaacttaatcactgggg

SEQ ID NO: 3217 - DNA, 20 bp, synthetic construct
  source 1..20: mol_type = other DNA
ataaaacttaatcactgggg

SEQ ID NO: 3218 - DNA, 21 bp, synthetic construct
  source 1..21: mol_type = other DNA
ataaaacttaatcactggggc

SEQ ID NO: 3219 - DNA, 20 bp, synthetic construct
  source 1..20: mol_type = other DNA
taaaacttaatcactggggc

SEQ ID NO: 3220 - DNA, 21 bp, synthetic construct
  source 1..21: mol_type = other DNA
taaaacttaatcactggggca

SEQ ID NO: 3221 - DNA, 20 bp, synthetic construct
  source 1..20: mol_type = other DNA
aaaacttaatcactggggca

SEQ ID NO: 3222 - DNA, 21 bp, synthetic construct
  source 1..21: mol_type = other DNA
aaaacttaatcactggggcac

SEQ ID NO: 3223 - DNA, 20 bp, synthetic construct
  source 1..20: mol_type = other DNA
aaacttaatcactggggcac

SEQ ID NO: 3224 - DNA, 21 bp, synthetic construct
  source 1..21: mol_type = other DNA
aaacttaatcactggggcaca

SEQ ID NO: 3225 - DNA, 20 bp, synthetic construct
  source 1..20: mol_type = other DNA
aacttaatcactggggcaca

SEQ ID NO: 3226 - DNA, 21 bp, synthetic construct
  source 1..21: mol_type = other DNA
aacttaatcactggggcacag

SEQ ID NO: 3227 - DNA, 20 bp, synthetic construct
  source 1..20: mol_type = other DNA
acttaatcactggggcacag

SEQ ID NO: 3228 - DNA, 21 bp, synthetic construct
  source 1..21: mol_type = other DNA
acttaatcactggggcacagg

SEQ ID NO: 3229 - DNA, 20 bp, synthetic construct
  source 1..20: mol_type = other DNA
cttaatcactggggcacagg

SEQ ID NO: 3230 - DNA, 21 bp, synthetic construct
  source 1..21: mol_type = other DNA
cttaatcactggggcacaggg

SEQ ID NO: 3231 - DNA, 20 bp, synthetic construct
  source 1..20: mol_type = other DNA
ttaatcactggggcacaggg

SEQ ID NO: 3232 - DNA, 21 bp, synthetic construct
  source 1..21: mol_type = other DNA
ttaatcactggggcacaggga

SEQ ID NO: 3233 - DNA, 20 bp, synthetic construct
  source 1..20: mol_type = other DNA
taatcactggggcacaggga

SEQ ID NO: 3234 - DNA, 21 bp, synthetic construct
  source 1..21: mol_type = other DNA
taatcactggggcacagggat

SEQ ID NO: 3235 - DNA, 20 bp, synthetic construct
  source 1..20: mol_type = other DNA
aatcactggggcacagggat

SEQ ID NO: 3236 - DNA, 21 bp, synthetic construct
  source 1..21: mol_type = other DNA
aatcactggggcacagggatg

SEQ ID NO: 3237 - DNA, 20 bp, synthetic construct
  source 1..20: mol_type = other DNA
atcactggggcacagggatg

SEQ ID NO: 3238 - DNA, 21 bp, synthetic construct
  source 1..21: mol_type = other DNA
atcactggggcacagggatgc

SEQ ID NO: 3239 - DNA, 20 bp, synthetic construct
  source 1..20: mol_type = other DNA
tcactggggcacagggatgc

SEQ ID NO: 3240 - DNA, 21 bp, synthetic construct
  source 1..21: mol_type = other DNA
tcactggggcacagggatgca

SEQ ID NO: 3241 - DNA, 20 bp, synthetic construct
  source 1..20: mol_type = other DNA
cactggggcacagggatgca

SEQ ID NO: 3242 - DNA, 21 bp, synthetic construct
  source 1..21: mol_type = other DNA
cactggggcacagggatgcac

SEQ ID NO: 3243 - DNA, 20 bp, synthetic construct
  source 1..20: mol_type = other DNA
actggggcacagggatgcac

SEQ ID NO: 3244 - DNA, 21 bp, synthetic construct
  source 1..21: mol_type = other DNA
actggggcacagggatgcacg

SEQ ID NO: 3245 - DNA, 20 bp, synthetic construct
  source 1..20: mol_type = other DNA
ctggggcacagggatgcacg

SEQ ID NO: 3246 - DNA, 21 bp, synthetic construct
  source 1..21: mol_type = other DNA
ctggggcacagggatgcacgc

SEQ ID NO: 3247 - DNA, 20 bp, synthetic construct
  source 1..20: mol_type = other DNA
tggggcacagggatgcacgc

SEQ ID NO: 3248 - DNA, 21 bp, synthetic construct
  source 1..21: mol_type = other DNA
tggggcacagggatgcacgct

SEQ ID NO: 3249 - DNA, 20 bp, synthetic construct
  source 1..20: mol_type = other DNA
ggggcacagggatgcacgct

SEQ ID NO: 3250 - DNA, 21 bp, synthetic construct
  source 1..21: mol_type = other DNA
ggggcacagggatgcacgctt

SEQ ID NO: 3251 - DNA, 20 bp, synthetic construct
  source 1..20: mol_type = other DNA
gggcacagggatgcacgctt

SEQ ID NO: 3252 - DNA, 21 bp, synthetic construct
  source 1..21: mol_type = other DNA
gggcacagggatgcacgcttg

SEQ ID NO: 3253 - DNA, 20 bp, synthetic construct
  source 1..20: mol_type = other DNA
ggcacagggatgcacgcttg

SEQ ID NO: 3254 - DNA, 21 bp, synthetic construct
  source 1..21: mol_type = other DNA
ggcacagggatgcacgcttgt

SEQ ID NO: 3255 - DNA, 20 bp, synthetic construct
  source 1..20: mol_type = other DNA
gcacagggatgcacgcttgt

SEQ ID NO: 3256 - DNA, 21 bp, synthetic construct
  source 1..21: mol_type = other DNA
gcacagggatgcacgcttgta

SEQ ID NO: 3257 - DNA, 20 bp, synthetic construct
  source 1..20: mol_type = other DNA
cacagggatgcacgcttgta

SEQ ID NO: 3258 - DNA, 21 bp, synthetic construct
  source 1..21: mol_type = other DNA
cacagggatgcacgcttgtaa

SEQ ID NO: 3259 - DNA, 20 bp, synthetic construct
  source 1..20: mol_type = other DNA
acagggatgcacgcttgtaa

SEQ ID NO: 3260 - DNA, 21 bp, synthetic construct
  source 1..21: mol_type = other DNA
acagggatgcacgcttgtaat

SEQ ID NO: 3261 - DNA, 20 bp, synthetic construct
  source 1..20: mol_type = other DNA
cagggatgcacgcttgtaat

SEQ ID NO: 3262 - DNA, 21 bp, synthetic construct
  source 1..21: mol_type = other DNA
cagggatgcacgcttgtaatc

SEQ ID NO: 3263 - DNA, 20 bp, synthetic construct
  source 1..20: mol_type = other DNA
agggatgcacgcttgtaatc

SEQ ID NO: 3264 - DNA, 21 bp, synthetic construct
  source 1..21: mol_type = other DNA
agggatgcacgcttgtaatcc

SEQ ID NO: 3265 - DNA, 20 bp, synthetic construct
  source 1..20: mol_type = other DNA
gggatgcacgcttgtaatcc

SEQ ID NO: 3266 - DNA, 21 bp, synthetic construct
  source 1..21: mol_type = other DNA
gggatgcacgcttgtaatccc

SEQ ID NO: 3267 - DNA, 20 bp, synthetic construct
  source 1..20: mol_type = other DNA
ggatgcacgcttgtaatccc

SEQ ID NO: 3268 - DNA, 21 bp, synthetic construct
  source 1..21: mol_type = other DNA
ggatgcacgcttgtaatccca

SEQ ID NO: 3269 - DNA, 20 bp, synthetic construct
  source 1..20: mol_type = other DNA
gatgcacgcttgtaatccca

SEQ ID NO: 3270 - DNA, 21 bp, synthetic construct
  source 1..21: mol_type = other DNA
gatgcacgcttgtaatcccag

SEQ ID NO: 3271 - DNA, 20 bp, synthetic construct
  source 1..20: mol_type = other DNA
atgcacgcttgtaatcccag

SEQ ID NO: 3272 - DNA, 21 bp, synthetic construct
  source 1..21: mol_type = other DNA
atgcacgcttgtaatcccagc

SEQ ID NO: 3273 - DNA, 20 bp, synthetic construct
  source 1..20: mol_type = other DNA
tgcacgcttgtaatcccagc

SEQ ID NO: 3274 - DNA, 21 bp, synthetic construct
  source 1..21: mol_type = other DNA
tgcacgcttgtaatcccagct

SEQ ID NO: 3275 - DNA, 20 bp, synthetic construct
  source 1..20: mol_type = other DNA
gcacgcttgtaatcccagct

SEQ ID NO: 3276 - DNA, 21 bp, synthetic construct
  source 1..21: mol_type = other DNA
gcacgcttgtaatcccagcta

SEQ ID NO: 3277 - DNA, 20 bp, synthetic construct
  source 1..20: mol_type = other DNA
cacgcttgtaatcccagcta

SEQ ID NO: 3278 - DNA, 21 bp, synthetic construct
  source 1..21: mol_type = other DNA
cacgcttgtaatcccagctac

SEQ ID NO: 3279 - DNA, 20 bp, synthetic construct
  source 1..20: mol_type = other DNA
acgcttgtaatcccagctac

SEQ ID NO: 3280 - DNA, 21 bp, synthetic construct
  source 1..21: mol_type = other DNA
acgcttgtaatcccagctact

SEQ ID NO: 3281 - DNA, 20 bp, synthetic construct
  source 1..20: mol_type = other DNA
cgcttgtaatcccagctact

SEQ ID NO: 3282 - DNA, 21 bp, synthetic construct
  source 1..21: mol_type = other DNA
cgcttgtaatcccagctactg

SEQ ID NO: 3283 - DNA, 20 bp, synthetic construct
  source 1..20: mol_type = other DNA
gcttgtaatcccagctactg

SEQ ID NO: 3284 - DNA, 21 bp, synthetic construct
  source 1..21: mol_type = other DNA
gcttgtaatcccagctactgg

SEQ ID NO: 3285 - DNA, 20 bp, synthetic construct
  source 1..20: mol_type = other DNA
cttgtaatcccagctactgg

SEQ ID NO: 3286 - DNA, 21 bp, synthetic construct
  source 1..21: mol_type = other DNA
cttgtaatcccagctactggg

SEQ ID NO: 3287 - DNA, 20 bp, synthetic construct
  source 1..20: mol_type = other DNA
ttgtaatcccagctactggg

SEQ ID NO: 3288 - DNA, 21 bp, synthetic construct
  source 1..21: mol_type = other DNA
ttgtaatcccagctactgggg

SEQ ID NO: 3289 - DNA, 20 bp, synthetic construct
  source 1..20: mol_type = other DNA
tgtaatcccagctactgggg

SEQ ID NO: 3290 - DNA, 21 bp, synthetic construct
  source 1..21: mol_type = other DNA
tgtaatcccagctactgggga

SEQ ID NO: 3291 - DNA, 20 bp, synthetic construct
  source 1..20: mol_type = other DNA
gtaatcccagctactgggga

SEQ ID NO: 3292 - DNA, 21 bp, synthetic construct
  source 1..21: mol_type = other DNA
gtaatcccagctactggggaa

SEQ ID NO: 3293 - DNA, 20 bp, synthetic construct
  source 1..20: mol_type = other DNA
taatcccagctactggggaa

SEQ ID NO: 3294 - DNA, 21 bp, synthetic construct
  source 1..21: mol_type = other DNA
taatcccagctactggggaag

SEQ ID NO: 3295 - DNA, 20 bp, synthetic construct
  source 1..20: mol_type = other DNA
aatcccagctactggggaag

SEQ ID NO: 3296 - DNA, 21 bp, synthetic construct
  source 1..21: mol_type = other DNA
aatcccagctactggggaagc

SEQ ID NO: 3297 - DNA, 20 bp, synthetic construct
  source 1..20: mol_type = other DNA
atcccagctactggggaagc

SEQ ID NO: 3298 - DNA, 21 bp, synthetic construct
  source 1..21: mol_type = other DNA
atcccagctactggggaagct

SEQ ID NO: 3299 - DNA, 20 bp, synthetic construct
  source 1..20: mol_type = other DNA
tcccagctactggggaagct

SEQ ID NO: 3300 - DNA, 21 bp, synthetic construct
  source 1..21: mol_type = other DNA
tcccagctactggggaagctt

SEQ ID NO: 3301 - DNA, 20 bp, synthetic construct
  source 1..20: mol_type = other DNA
cccagctactggggaagctt

SEQ ID NO: 3302 - DNA, 21 bp, synthetic construct
  source 1..21: mol_type = other DNA
cccagctactggggaagctta

SEQ ID NO: 3303 - DNA, 20 bp, synthetic construct
  source 1..20: mol_type = other DNA
ccagctactggggaagctta

SEQ ID NO: 3304 - DNA, 21 bp, synthetic construct
  source 1..21: mol_type = other DNA
ccagctactggggaagcttag

SEQ ID NO: 3305 - DNA, 20 bp, synthetic construct
  source 1..20: mol_type = other DNA
cagctactggggaagcttag

SEQ ID NO: 3306 - DNA, 21 bp, synthetic construct
  source 1..21: mol_type = other DNA
cagctactggggaagcttagg

SEQ ID NO: 3307 - DNA, 20 bp, synthetic construct
  source 1..20: mol_type = other DNA
agctactggggaagcttagg

SEQ ID NO: 3308 - DNA, 21 bp, synthetic construct
  source 1..21: mol_type = other DNA
agctactggggaagcttaggc

SEQ ID NO: 3309 - DNA, 20 bp, synthetic construct
  source 1..20: mol_type = other DNA
gctactggggaagcttaggc

SEQ ID NO: 3310 - DNA, 21 bp, synthetic construct
  source 1..21: mol_type = other DNA
gctactggggaagcttaggca

SEQ ID NO: 3311 - DNA, 20 bp, synthetic construct
  source 1..20: mol_type = other DNA
ctactggggaagcttaggca

SEQ ID NO: 3312 - DNA, 21 bp, synthetic construct
  source 1..21: mol_type = other DNA
ctactggggaagcttaggcag

SEQ ID NO: 3313 - DNA, 20 bp, synthetic construct
  source 1..20: mol_type = other DNA
tactggggaagcttaggcag

SEQ ID NO: 3314 - DNA, 21 bp, synthetic construct
  source 1..21: mol_type = other DNA
tactggggaagcttaggcagg

SEQ ID NO: 3315 - DNA, 20 bp, synthetic construct
  source 1..20: mol_type = other DNA
actggggaagcttaggcagg

SEQ ID NO: 3316 - DNA, 21 bp, synthetic construct
  source 1..21: mol_type = other DNA
actggggaagcttaggcagga

SEQ ID NO: 3317 - DNA, 20 bp, synthetic construct
  source 1..20: mol_type = other DNA
ctggggaagcttaggcagga

SEQ ID NO: 3318 - DNA, 21 bp, synthetic construct
  source 1..21: mol_type = other DNA
ctggggaagcttaggcaggac

SEQ ID NO: 3319 - DNA, 20 bp, synthetic construct
  source 1..20: mol_type = other DNA
tggggaagcttaggcaggac

SEQ ID NO: 3320 - DNA, 21 bp, synthetic construct
  source 1..21: mol_type = other DNA
tggggaagcttaggcaggacg

SEQ ID NO: 3321 - DNA, 20 bp, synthetic construct
  source 1..20: mol_type = other DNA
ggggaagcttaggcaggacg

SEQ ID NO: 3322 - DNA, 21 bp, synthetic construct
  source 1..21: mol_type = other DNA
ggggaagcttaggcaggacga

SEQ ID NO: 3323 - DNA, 20 bp, synthetic construct
  source 1..20: mol_type = other DNA
gggaagcttaggcaggacga

SEQ ID NO: 3324 - DNA, 21 bp, synthetic construct
  source 1..21: mol_type = other DNA
gggaagcttaggcaggacgac

SEQ ID NO: 3325 - DNA, 20 bp, synthetic construct
  source 1..20: mol_type = other DNA
ggaagcttaggcaggacgac

SEQ ID NO: 3326 - DNA, 21 bp, synthetic construct
  source 1..21: mol_type = other DNA
ggaagcttaggcaggacgact

SEQ ID NO: 3327 - DNA, 20 bp, synthetic construct
  source 1..20: mol_type = other DNA
gaagcttaggcaggacgact

SEQ ID NO: 3328 - DNA, 21 bp, synthetic construct
  source 1..21: mol_type = other DNA
gaagcttaggcaggacgactg

SEQ ID NO: 3329 - DNA, 20 bp, synthetic construct
  source 1..20: mol_type = other DNA
aagcttaggcaggacgactg

SEQ ID NO: 3330 - DNA, 21 bp, synthetic construct
  source 1..21: mol_type = other DNA
aagcttaggcaggacgactgt

SEQ ID NO: 3331 - DNA, 20 bp, synthetic construct
  source 1..20: mol_type = other DNA
agcttaggcaggacgactgt

SEQ ID NO: 3332 - DNA, 21 bp, synthetic construct
  source 1..21: mol_type = other DNA
agcttaggcaggacgactgtt

SEQ ID NO: 3333 - DNA, 20 bp, synthetic construct
  source 1..20: mol_type = other DNA
gcttaggcaggacgactgtt

SEQ ID NO: 3334 - DNA, 21 bp, synthetic construct
  source 1..21: mol_type = other DNA
gcttaggcaggacgactgttt

SEQ ID NO: 3335 - DNA, 20 bp, synthetic construct
  source 1..20: mol_type = other DNA
cttaggcaggacgactgttt

SEQ ID NO: 3336 - DNA, 21 bp, synthetic construct
  source 1..21: mol_type = other DNA
cttaggcaggacgactgtttg

SEQ ID NO: 3337 - DNA, 20 bp, synthetic construct
  source 1..20: mol_type = other DNA
ttaggcaggacgactgtttg

SEQ ID NO: 3338 - DNA, 21 bp, synthetic construct
  source 1..21: mol_type = other DNA
ttaggcaggacgactgtttga

SEQ ID NO: 3339 - DNA, 20 bp, synthetic construct
  source 1..20: mol_type = other DNA
taggcaggacgactgtttga

SEQ ID NO: 3340 - DNA, 21 bp, synthetic construct
  source 1..21: mol_type = other DNA
taggcaggacgactgtttgag

SEQ ID NO: 3341 - DNA, 20 bp, synthetic construct
  source 1..20: mol_type = other DNA
aggcaggacgactgtttgag

SEQ ID NO: 3342 - DNA, 21 bp, synthetic construct
  source 1..21: mol_type = other DNA
aggcaggacgactgtttgagc

SEQ ID NO: 3343 - DNA, 20 bp, synthetic construct
  source 1..20: mol_type = other DNA
ggcaggacgactgtttgagc

SEQ ID NO: 3344 - DNA, 21 bp, synthetic construct
  source 1..21: mol_type = other DNA
ggcaggacgactgtttgagct

SEQ ID NO: 3345 - DNA, 20 bp, synthetic construct
  source 1..20: mol_type = other DNA
gcaggacgactgtttgagct

SEQ ID NO: 3346 - DNA, 21 bp, synthetic construct
  source 1..21: mol_type = other DNA
gcaggacgactgtttgagctc

SEQ ID NO: 3347 - DNA, 20 bp, synthetic construct
  source 1..20: mol_type = other DNA
caggacgactgtttgagctc

SEQ ID NO: 3348 - DNA, 21 bp, synthetic construct
  source 1..21: mol_type = other DNA
caggacgactgtttgagctca

SEQ ID NO: 3349 - DNA, 20 bp, synthetic construct
  source 1..20: mol_type = other DNA
aggacgactgtttgagctca

SEQ ID NO: 3350 - DNA, 21 bp, synthetic construct
  source 1..21: mol_type = other DNA
aggacgactgtttgagctcag

SEQ ID NO: 3351 - DNA, 20 bp, synthetic construct
  source 1..20: mol_type = other DNA
ggacgactgtttgagctcag

SEQ ID NO: 3352 - DNA, 21 bp, synthetic construct
  source 1..21: mol_type = other DNA
ggacgactgtttgagctcagg

SEQ ID NO: 3353 - DNA, 20 bp, synthetic construct
  source 1..20: mol_type = other DNA
gacgactgtttgagctcagg

SEQ ID NO: 3354 - DNA, 21 bp, synthetic construct
  source 1..21: mol_type = other DNA
gacgactgtttgagctcagga

SEQ ID NO: 3355 - DNA, 20 bp, synthetic construct
  source 1..20: mol_type = other DNA
acgactgtttgagctcagga

SEQ ID NO: 3356 - DNA, 21 bp, synthetic construct
  source 1..21: mol_type = other DNA
acgactgtttgagctcaggag

SEQ ID NO: 3357 - DNA, 20 bp, synthetic construct
  source 1..20: mol_type = other DNA
cgactgtttgagctcaggag

SEQ ID NO: 3358 - DNA, 21 bp, synthetic construct
  source 1..21: mol_type = other DNA
cgactgtttgagctcaggagt

SEQ ID NO: 3359 - DNA, 20 bp, synthetic construct
  source 1..20: mol_type = other DNA
gactgtttgagctcaggagt

SEQ ID NO: 3360 - DNA, 21 bp, synthetic construct
  source 1..21: mol_type = other DNA
gactgtttgagctcaggagtt

SEQ ID NO: 3361 - DNA, 20 bp, synthetic construct
  source 1..20: mol_type = other DNA
actgtttgagctcaggagtt

SEQ ID NO: 3362 - DNA, 21 bp, synthetic construct
  source 1..21: mol_type = other DNA
actgtttgagctcaggagttt

SEQ ID NO: 3363 - DNA, 20 bp, synthetic construct
  source 1..20: mol_type = other DNA
ctgtttgagctcaggagttt

SEQ ID NO: 3364 - DNA, 21 bp, synthetic construct
  source 1..21: mol_type = other DNA
ctgtttgagctcaggagtttc

SEQ ID NO: 3365 - DNA, 20 bp, synthetic construct
  source 1..20: mol_type = other DNA
tgtttgagctcaggagtttc

SEQ ID NO: 3366 - DNA, 21 bp, synthetic construct
  source 1..21: mol_type = other DNA
tgtttgagctcaggagtttca

SEQ ID NO: 3367 - DNA, 20 bp, synthetic construct
  source 1..20: mol_type = other DNA
gtttgagctcaggagtttca

SEQ ID NO: 3368 - DNA, 21 bp, synthetic construct
  source 1..21: mol_type = other DNA
gtttgagctcaggagtttcag

SEQ ID NO: 3369 - DNA, 20 bp, synthetic construct
  source 1..20: mol_type = other DNA
tttgagctcaggagtttcag

SEQ ID NO: 3370 - DNA, 21 bp, synthetic construct
  source 1..21: mol_type = other DNA
tttgagctcaggagtttcaga

SEQ ID NO: 3371 - DNA, 20 bp, synthetic construct
  source 1..20: mol_type = other DNA
ttgagctcaggagtttcaga

SEQ ID NO: 3372 - DNA, 21 bp, synthetic construct
  source 1..21: mol_type = other DNA
ttgagctcaggagtttcagac

SEQ ID NO: 3373 - DNA, 20 bp, synthetic construct
  source 1..20: mol_type = other DNA
tgagctcaggagtttcagac

SEQ ID NO: 3374 - DNA, 21 bp, synthetic construct
  source 1..21: mol_type = other DNA
tgagctcaggagtttcagact

SEQ ID NO: 3375 - DNA, 20 bp, synthetic construct
  source 1..20: mol_type = other DNA
gagctcaggagtttcagact

SEQ ID NO: 3376 - DNA, 21 bp, synthetic construct
  source 1..21: mol_type = other DNA
gagctcaggagtttcagactg

SEQ ID NO: 3377 - DNA, 20 bp, synthetic construct
  source 1..20: mol_type = other DNA
agctcaggagtttcagactg

SEQ ID NO: 3378 - DNA, 21 bp, synthetic construct
  source 1..21: mol_type = other DNA
agctcaggagtttcagactgt

SEQ ID NO: 3379 - DNA, 20 bp, synthetic construct
  source 1..20: mol_type = other DNA
gctcaggagtttcagactgt

SEQ ID NO: 3380 - DNA, 21 bp, synthetic construct
  source 1..21: mol_type = other DNA
gctcaggagtttcagactgta

SEQ ID NO: 3381 - DNA, 20 bp, synthetic construct
  source 1..20: mol_type = other DNA
ctcaggagtttcagactgta

SEQ ID NO: 3382 - DNA, 21 bp, synthetic construct
  source 1..21: mol_type = other DNA
ctcaggagtttcagactgtag

SEQ ID NO: 3383 - DNA, 20 bp, synthetic construct
  source 1..20: mol_type = other DNA
tcaggagtttcagactgtag

SEQ ID NO: 3384 - DNA, 21 bp, synthetic construct
  source 1..21: mol_type = other DNA
tcaggagtttcagactgtagt

SEQ ID NO: 3385 - DNA, 20 bp, synthetic construct
  source 1..20: mol_type = other DNA
caggagtttcagactgtagt

SEQ ID NO: 3386 - DNA, 21 bp, synthetic construct
  source 1..21: mol_type = other DNA
caggagtttcagactgtagtg

SEQ ID NO: 3387 - DNA, 20 bp, synthetic construct
  source 1..20: mol_type = other DNA
aggagtttcagactgtagtg

SEQ ID NO: 3388 - DNA, 21 bp, synthetic construct
  source 1..21: mol_type = other DNA
aggagtttcagactgtagtgc

SEQ ID NO: 3389 - DNA, 20 bp, synthetic construct
  source 1..20: mol_type = other DNA
ggagtttcagactgtagtgc

SEQ ID NO: 3390 - DNA, 21 bp, synthetic construct
  source 1..21: mol_type = other DNA
ggagtttcagactgtagtgca

SEQ ID NO: 3391 - DNA, 20 bp, synthetic construct
  source 1..20: mol_type = other DNA
gagtttcagactgtagtgca

SEQ ID NO: 3392 - DNA, 21 bp, synthetic construct
  source 1..21: mol_type = other DNA
gagtttcagactgtagtgcat

SEQ ID NO: 3393 - DNA, 20 bp, synthetic construct
  source 1..20: mol_type = other DNA
agtttcagactgtagtgcat

SEQ ID NO: 3394 - DNA, 21 bp, synthetic construct
  source 1..21: mol_type = other DNA
agtttcagactgtagtgcatt

SEQ ID NO: 3395 - DNA, 20 bp, synthetic construct
  source 1..20: mol_type = other DNA
gtttcagactgtagtgcatt

SEQ ID NO: 3396 - DNA, 21 bp, synthetic construct
  source 1..21: mol_type = other DNA
gtttcagactgtagtgcatta

SEQ ID NO: 3397 - DNA, 20 bp, synthetic construct
  source 1..20: mol_type = other DNA
tttcagactgtagtgcatta

SEQ ID NO: 3398 - DNA, 21 bp, synthetic construct
  source 1..21: mol_type = other DNA
tttcagactgtagtgcattat

SEQ ID NO: 3399 - DNA, 20 bp, synthetic construct
  source 1..20: mol_type = other DNA
ttcagactgtagtgcattat

SEQ ID NO: 3400 - DNA, 21 bp, synthetic construct
  source 1..21: mol_type = other DNA
ttcagactgtagtgcattatg

SEQ ID NO: 3401 - DNA, 20 bp, synthetic construct
  source 1..20: mol_type = other DNA
tcagactgtagtgcattatg

SEQ ID NO: 3402 - DNA, 21 bp, synthetic construct
  source 1..21: mol_type = other DNA
tcagactgtagtgcattatga

SEQ ID NO: 3403 - DNA, 20 bp, synthetic construct
  source 1..20: mol_type = other DNA
cagactgtagtgcattatga

SEQ ID NO: 3404 - DNA, 21 bp, synthetic construct
  source 1..21: mol_type = other DNA
cagactgtagtgcattatgac

SEQ ID NO: 3405 - DNA, 20 bp, synthetic construct
  source 1..20: mol_type = other DNA
agactgtagtgcattatgac

SEQ ID NO: 3406 - DNA, 21 bp, synthetic construct
  source 1..21: mol_type = other DNA
agactgtagtgcattatgact

SEQ ID NO: 3407 - DNA, 20 bp, synthetic construct
  source 1..20: mol_type = other DNA
gactgtagtgcattatgact

SEQ ID NO: 3408 - DNA, 21 bp, synthetic construct
  source 1..21: mol_type = other DNA
gactgtagtgcattatgactg

SEQ ID NO: 3409 - DNA, 20 bp, synthetic construct
  source 1..20: mol_type = other DNA
actgtagtgcattatgactg

SEQ ID NO: 3410 - DNA, 21 bp, synthetic construct
  source 1..21: mol_type = other DNA
actgtagtgcattatgactgc

SEQ ID NO: 3411 - DNA, 20 bp, synthetic construct
  source 1..20: mol_type = other DNA
ctgtagtgcattatgactgc

SEQ ID NO: 3412 - DNA, 21 bp, synthetic construct
  source 1..21: mol_type = other DNA
ctgtagtgcattatgactgca

SEQ ID NO: 3413 - DNA, 20 bp, synthetic construct
  source 1..20: mol_type = other DNA
tgtagtgcattatgactgca

SEQ ID NO: 3414 - DNA, 21 bp, synthetic construct
  source 1..21: mol_type = other DNA
tgtagtgcattatgactgcac

SEQ ID NO: 3415 - DNA, 20 bp, synthetic construct
  source 1..20: mol_type = other DNA
gtagtgcattatgactgcac

SEQ ID NO: 3416 - DNA, 21 bp, synthetic construct
  source 1..21: mol_type = other DNA
gtagtgcattatgactgcacc

SEQ ID NO: 3417 - DNA, 20 bp, synthetic construct
  source 1..20: mol_type = other DNA
tagtgcattatgactgcacc

SEQ ID NO: 3418 - DNA, 21 bp, synthetic construct
  source 1..21: mol_type = other DNA
tagtgcattatgactgcacct

SEQ ID NO: 3419 - DNA, 20 bp, synthetic construct
  source 1..20: mol_type = other DNA
agtgcattatgactgcacct

SEQ ID NO: 3420 - DNA, 21 bp, synthetic construct
  source 1..21: mol_type = other DNA
agtgcattatgactgcacctg

SEQ ID NO: 3421 - DNA, 20 bp, synthetic construct
  source 1..20: mol_type = other DNA
gtgcattatgactgcacctg

SEQ ID NO: 3422 - DNA, 21 bp, synthetic construct
  source 1..21: mol_type = other DNA
gtgcattatgactgcacctgt

SEQ ID NO: 3423 - DNA, 20 bp, synthetic construct
  source 1..20: mol_type = other DNA
tgcattatgactgcacctgt

SEQ ID NO: 3424 - DNA, 21 bp, synthetic construct
  source 1..21: mol_type = other DNA
tgcattatgactgcacctgtg

SEQ ID NO: 3425 - DNA, 20 bp, synthetic construct
  source 1..20: mol_type = other DNA
gcattatgactgcacctgtg

SEQ ID NO: 3426 - DNA, 21 bp, synthetic construct
  source 1..21: mol_type = other DNA
gcattatgactgcacctgtga

SEQ ID NO: 3427 - DNA, 20 bp, synthetic construct
  source 1..20: mol_type = other DNA
cattatgactgcacctgtga

SEQ ID NO: 3428 - DNA, 21 bp, synthetic construct
  source 1..21: mol_type = other DNA
cattatgactgcacctgtgaa

SEQ ID NO: 3429 - DNA, 20 bp, synthetic construct
  source 1..20: mol_type = other DNA
attatgactgcacctgtgaa

SEQ ID NO: 3430 - DNA, 21 bp, synthetic construct
  source 1..21: mol_type = other DNA
attatgactgcacctgtgaat

SEQ ID NO: 3431 - DNA, 20 bp, synthetic construct
  source 1..20: mol_type = other DNA
ttatgactgcacctgtgaat

SEQ ID NO: 3432 - DNA, 21 bp, synthetic construct
  source 1..21: mol_type = other DNA
ttatgactgcacctgtgaata

SEQ ID NO: 3433 - DNA, 20 bp, synthetic construct
  source 1..20: mol_type = other DNA
tatgactgcacctgtgaata

SEQ ID NO: 3434 - DNA, 21 bp, synthetic construct
  source 1..21: mol_type = other DNA
tatgactgcacctgtgaatag

SEQ ID NO: 3435 - DNA, 20 bp, synthetic construct
  source 1..20: mol_type = other DNA
atgactgcacctgtgaatag

SEQ ID NO: 3436 - DNA, 21 bp, synthetic construct
  source 1..21: mol_type = other DNA
atgactgcacctgtgaatagc

SEQ ID NO: 3437 - DNA, 20 bp, synthetic construct
  source 1..20: mol_type = other DNA
tgactgcacctgtgaatagc

SEQ ID NO: 3438 - DNA, 21 bp, synthetic construct
  source 1..21: mol_type = other DNA
tgactgcacctgtgaatagcc

SEQ ID NO: 3439 - DNA, 20 bp, synthetic construct
  source 1..20: mol_type = other DNA
gactgcacctgtgaatagcc

SEQ ID NO: 3440 - DNA, 21 bp, synthetic construct
  source 1..21: mol_type = other DNA
gactgcacctgtgaatagcca

SEQ ID NO: 3441 - DNA, 20 bp, synthetic construct
  source 1..20: mol_type = other DNA
actgcacctgtgaatagcca

SEQ ID NO: 3442 - DNA, 21 bp, synthetic construct
  source 1..21: mol_type = other DNA
actgcacctgtgaatagccac

SEQ ID NO: 3443 - DNA, 20 bp, synthetic construct
  source 1..20: mol_type = other DNA
ctgcacctgtgaatagccac

SEQ ID NO: 3444 - DNA, 21 bp, synthetic construct
  source 1..21: mol_type = other DNA
ctgcacctgtgaatagccact

SEQ ID NO: 3445 - DNA, 20 bp, synthetic construct
  source 1..20: mol_type = other DNA
tgcacctgtgaatagccact

SEQ ID NO: 3446 - DNA, 21 bp, synthetic construct
  source 1..21: mol_type = other DNA
tgcacctgtgaatagccactg

SEQ ID NO: 3447 - DNA, 20 bp, synthetic construct
  source 1..20: mol_type = other DNA
gcacctgtgaatagccactg

SEQ ID NO: 3448 - DNA, 21 bp, synthetic construct
  source 1..21: mol_type = other DNA
gcacctgtgaatagccactgc

SEQ ID NO: 3449 - DNA, 20 bp, synthetic construct
  source 1..20: mol_type = other DNA
cacctgtgaatagccactgc

SEQ ID NO: 3450 - DNA, 21 bp, synthetic construct
  source 1..21: mol_type = other DNA
cacctgtgaatagccactgca

SEQ ID NO: 3451 - DNA, 20 bp, synthetic construct
  source 1..20: mol_type = other DNA
acctgtgaatagccactgca

SEQ ID NO: 3452 - DNA, 21 bp, synthetic construct
  source 1..21: mol_type = other DNA
acctgtgaatagccactgcat

SEQ ID NO: 3453 - DNA, 20 bp, synthetic construct
  source 1..20: mol_type = other DNA
cctgtgaatagccactgcat

SEQ ID NO: 3454 - DNA, 21 bp, synthetic construct
  source 1..21: mol_type = other DNA
cctgtgaatagccactgcatt

SEQ ID NO: 3455 - DNA, 20 bp, synthetic construct
  source 1..20: mol_type = other DNA
ctgtgaatagccactgcatt

SEQ ID NO: 3456 - DNA, 21 bp, synthetic construct
  source 1..21: mol_type = other DNA
ctgtgaatagccactgcattc

SEQ ID NO: 3457 - DNA, 20 bp, synthetic construct
  source 1..20: mol_type = other DNA
tgtgaatagccactgcattc

SEQ ID NO: 3458 - DNA, 21 bp, synthetic construct
  source 1..21: mol_type = other DNA
tgtgaatagccactgcattcc

SEQ ID NO: 3459 - DNA, 20 bp, synthetic construct
  source 1..20: mol_type = other DNA
gtgaatagccactgcattcc

SEQ ID NO: 3460 - DNA, 21 bp, synthetic construct
  source 1..21: mol_type = other DNA
gtgaatagccactgcattcca

SEQ ID NO: 3461 - DNA, 20 bp, synthetic construct
  source 1..20: mol_type = other DNA
tgaatagccactgcattcca

SEQ ID NO: 3462 - DNA, 21 bp, synthetic construct
  source 1..21: mol_type = other DNA
tgaatagccactgcattccag

SEQ ID NO: 3463 - DNA, 20 bp, synthetic construct
  source 1..20: mol_type = other DNA
gaatagccactgcattccag

SEQ ID NO: 3464 - DNA, 21 bp, synthetic construct
  source 1..21: mol_type = other DNA
gaatagccactgcattccagc

SEQ ID NO: 3465 - DNA, 20 bp, synthetic construct
  source 1..20: mol_type = other DNA
aatagccactgcattccagc

SEQ ID NO: 3466 - DNA, 21 bp, synthetic construct
  source 1..21: mol_type = other DNA
aatagccactgcattccagcc

SEQ ID NO: 3467 - DNA, 20 bp, synthetic construct
  source 1..20: mol_type = other DNA
atagccactgcattccagcc

SEQ ID NO: 3468 - DNA, 21 bp, synthetic construct
  source 1..21: mol_type = other DNA
atagccactgcattccagccc

SEQ ID NO: 3469 - DNA, 20 bp, synthetic construct
  source 1..20: mol_type = other DNA
tagccactgcattccagccc

SEQ ID NO: 3470 - DNA, 21 bp, synthetic construct
  source 1..21: mol_type = other DNA
tagccactgcattccagccct

SEQ ID NO: 3471 - DNA, 20 bp, synthetic construct
  source 1..20: mol_type = other DNA
agccactgcattccagccct

SEQ ID NO: 3472 - DNA, 21 bp, synthetic construct
  source 1..21: mol_type = other DNA
agccactgcattccagccctt

SEQ ID NO: 3473 - DNA, 20 bp, synthetic construct
  source 1..20: mol_type = other DNA
gccactgcattccagccctt

SEQ ID NO: 3474 - DNA, 21 bp, synthetic construct
  source 1..21: mol_type = other DNA
gccactgcattccagccctta

SEQ ID NO: 3475 - DNA, 20 bp, synthetic construct
  source 1..20: mol_type = other DNA
ccactgcattccagccctta

SEQ ID NO: 3476 - DNA, 21 bp, synthetic construct
  source 1..21: mol_type = other DNA
ccactgcattccagcccttag

SEQ ID NO: 3477 - DNA, 20 bp, synthetic construct
  source 1..20: mol_type = other DNA
cactgcattccagcccttag

SEQ ID NO: 3478 - DNA, 21 bp, synthetic construct
  source 1..21: mol_type = other DNA
cactgcattccagcccttagc

SEQ ID NO: 3479 - DNA, 20 bp, synthetic construct
  source 1..20: mol_type = other DNA
actgcattccagcccttagc

SEQ ID NO: 3480 - DNA, 21 bp, synthetic construct
  source 1..21: mol_type = other DNA
actgcattccagcccttagcg

SEQ ID NO: 3481 - DNA, 20 bp, synthetic construct
  source 1..20: mol_type = other DNA
ctgcattccagcccttagcg

SEQ ID NO: 3482 - DNA, 21 bp, synthetic construct
  source 1..21: mol_type = other DNA
ctgcattccagcccttagcga

SEQ ID NO: 3483 - DNA, 20 bp, synthetic construct
  source 1..20: mol_type = other DNA
tgcattccagcccttagcga

SEQ ID NO: 3484 - DNA, 21 bp, synthetic construct
  source 1..21: mol_type = other DNA
tgcattccagcccttagcgag

SEQ ID NO: 3485 - DNA, 20 bp, synthetic construct
  source 1..20: mol_type = other DNA
gcattccagcccttagcgag

SEQ ID NO: 3486 - DNA, 21 bp, synthetic construct
  source 1..21: mol_type = other DNA
gcattccagcccttagcgaga

SEQ ID NO: 3487 - DNA, 20 bp, synthetic construct
  source 1..20: mol_type = other DNA
cattccagcccttagcgaga

SEQ ID NO: 3488 - DNA, 21 bp, synthetic construct
  source 1..21: mol_type = other DNA
cattccagcccttagcgagac

SEQ ID NO: 3489 - DNA, 20 bp, synthetic construct
  source 1..20: mol_type = other DNA
attccagcccttagcgagac

SEQ ID NO: 3490 - DNA, 21 bp, synthetic construct
  source 1..21: mol_type = other DNA
attccagcccttagcgagacc

SEQ ID NO: 3491 - DNA, 20 bp, synthetic construct
  source 1..20: mol_type = other DNA
ttccagcccttagcgagacc

SEQ ID NO: 3492 - DNA, 21 bp, synthetic construct
  source 1..21: mol_type = other DNA
ttccagcccttagcgagacct

SEQ ID NO: 3493 - DNA, 20 bp, synthetic construct
  source 1..20: mol_type = other DNA
tccagcccttagcgagacct

SEQ ID NO: 3494 - DNA, 21 bp, synthetic construct
  source 1..21: mol_type = other DNA
tccagcccttagcgagacctt

SEQ ID NO: 3495 - DNA, 20 bp, synthetic construct
  source 1..20: mol_type = other DNA
ccagcccttagcgagacctt

SEQ ID NO: 3496 - DNA, 21 bp, synthetic construct
  source 1..21: mol_type = other DNA
ccagcccttagcgagaccttg

SEQ ID NO: 3497 - DNA, 20 bp, synthetic construct
  source 1..20: mol_type = other DNA
cagcccttagcgagaccttg

SEQ ID NO: 3498 - DNA, 21 bp, synthetic construct
  source 1..21: mol_type = other DNA
cagcccttagcgagaccttgc

SEQ ID NO: 3499 - DNA, 20 bp, synthetic construct
  source 1..20: mol_type = other DNA
agcccttagcgagaccttgc

SEQ ID NO: 3500 - DNA, 21 bp, synthetic construct
  source 1..21: mol_type = other DNA
agcccttagcgagaccttgcc

SEQ ID NO: 3501 - DNA, 20 bp, synthetic construct
  source 1..20: mol_type = other DNA
gcccttagcgagaccttgcc

SEQ ID NO: 3502 - DNA, 21 bp, synthetic construct
  source 1..21: mol_type = other DNA
gcccttagcgagaccttgcct

SEQ ID NO: 3503 - DNA, 20 bp, synthetic construct
  source 1..20: mol_type = other DNA
cccttagcgagaccttgcct

SEQ ID NO: 3504 - DNA, 21 bp, synthetic construct
  source 1..21: mol_type = other DNA
cccttagcgagaccttgcctc

SEQ ID NO: 3505 - DNA, 20 bp, synthetic construct
  source 1..20: mol_type = other DNA
ccttagcgagaccttgcctc

SEQ ID NO: 3506 - DNA, 21 bp, synthetic construct
  source 1..21: mol_type = other DNA
ccttagcgagaccttgcctca

SEQ ID NO: 3507 - DNA, 20 bp, synthetic construct
  source 1..20: mol_type = other DNA
cttagcgagaccttgcctca

SEQ ID NO: 3508 - DNA, 21 bp, synthetic construct
  source 1..21: mol_type = other DNA
cttagcgagaccttgcctcaa

SEQ ID NO: 3509 - DNA, 20 bp, synthetic construct
  source 1..20: mol_type = other DNA
ttagcgagaccttgcctcaa

SEQ ID NO: 3510 - DNA, 21 bp, synthetic construct
  source 1..21: mol_type = other DNA
ttagcgagaccttgcctcaag

SEQ ID NO: 3511 - DNA, 20 bp, synthetic construct
  source 1..20: mol_type = other DNA
tagcgagaccttgcctcaag

SEQ ID NO: 3512 - DNA, 21 bp, synthetic construct
  source 1..21: mol_type = other DNA
tagcgagaccttgcctcaaga

SEQ ID NO: 3513 - DNA, 20 bp, synthetic construct
  source 1..20: mol_type = other DNA
agcgagaccttgcctcaaga

SEQ ID NO: 3514 - DNA, 21 bp, synthetic construct
  source 1..21: mol_type = other DNA
agcgagaccttgcctcaagac

SEQ ID NO: 3515 - DNA, 20 bp, synthetic construct
  source 1..20: mol_type = other DNA
gcgagaccttgcctcaagac

SEQ ID NO: 3516 - DNA, 21 bp, synthetic construct
  source 1..21: mol_type = other DNA
gcgagaccttgcctcaagact

SEQ ID NO: 3517 - DNA, 20 bp, synthetic construct
  source 1..20: mol_type = other DNA
cgagaccttgcctcaagact

SEQ ID NO: 3518 - DNA, 21 bp, synthetic construct
  source 1..21: mol_type = other DNA
cgagaccttgcctcaagactt

SEQ ID NO: 3519 - DNA, 20 bp, synthetic construct
  source 1..20: mol_type = other DNA
gagaccttgcctcaagactt

SEQ ID NO: 3520 - DNA, 21 bp, synthetic construct
  source 1..21: mol_type = other DNA
gagaccttgcctcaagacttt

SEQ ID NO: 3521 - DNA, 20 bp, synthetic construct
  source 1..20: mol_type = other DNA
agaccttgcctcaagacttt

SEQ ID NO: 3522 - DNA, 21 bp, synthetic construct
  source 1..21: mol_type = other DNA
agaccttgcctcaagactttg

SEQ ID NO: 3523 - DNA, 20 bp, synthetic construct
  source 1..20: mol_type = other DNA
gaccttgcctcaagactttg

SEQ ID NO: 3524 - DNA, 21 bp, synthetic construct
  source 1..21: mol_type = other DNA
gaccttgcctcaagactttgg

SEQ ID NO: 3525 - DNA, 20 bp, synthetic construct
  source 1..20: mol_type = other DNA
accttgcctcaagactttgg

SEQ ID NO: 3526 - DNA, 21 bp, synthetic construct
  source 1..21: mol_type = other DNA
accttgcctcaagactttggg

SEQ ID NO: 3527 - DNA, 20 bp, synthetic construct
  source 1..20: mol_type = other DNA
ccttgcctcaagactttggg

SEQ ID NO: 3528 - DNA, 21 bp, synthetic construct
  source 1..21: mol_type = other DNA
ccttgcctcaagactttgggg

SEQ ID NO: 3529 - DNA, 20 bp, synthetic construct
  source 1..20: mol_type = other DNA
cttgcctcaagactttgggg

SEQ ID NO: 3530 - DNA, 21 bp, synthetic construct
  source 1..21: mol_type = other DNA
cttgcctcaagactttgggga

SEQ ID NO: 3531 - DNA, 20 bp, synthetic construct
  source 1..20: mol_type = other DNA
ttgcctcaagactttgggga

SEQ ID NO: 3532 - DNA, 21 bp, synthetic construct
  source 1..21: mol_type = other DNA
ttgcctcaagactttggggag

SEQ ID NO: 3533 - DNA, 20 bp, synthetic construct
  source 1..20: mol_type = other DNA
tgcctcaagactttggggag

SEQ ID NO: 3534 - DNA, 22 bp, synthetic construct
  source 1..22: mol_type = other DNA
gaaatggccaggctaaaaagtt

SEQ ID NO: 3535 - DNA, 22 bp, synthetic construct
  source 1..22: mol_type = other DNA
aaatggccaggctaaaaagtta

SEQ ID NO: 3536 - DNA, 22 bp, synthetic construct
  source 1..22: mol_type = other DNA
aatggccaggctaaaaagttat

SEQ ID NO: 3537 - DNA, 22 bp, synthetic construct
  source 1..22: mol_type = other DNA
atggccaggctaaaaagttatg

SEQ ID NO: 3538 - DNA, 22 bp, synthetic construct
  source 1..22: mol_type = other DNA
tggccaggctaaaaagttatga

SEQ ID NO: 3539 - DNA, 22 bp, synthetic construct
  source 1..22: mol_type = other DNA
ggccaggctaaaaagttatgaa

SEQ ID NO: 3540 - DNA, 22 bp, synthetic construct
  source 1..22: mol_type = other DNA
gccaggctaaaaagttatgaaa

SEQ ID NO: 3541 - DNA, 22 bp, synthetic construct
  source 1..22: mol_type = other DNA
ccaggctaaaaagttatgaaaa

SEQ ID NO: 3542 - DNA, 22 bp, synthetic construct
  source 1..22: mol_type = other DNA
caggctaaaaagttatgaaaat

SEQ ID NO: 3543 - DNA, 22 bp, synthetic construct
  source 1..22: mol_type = other DNA
aggctaaaaagttatgaaaatt

SEQ ID NO: 3544 - DNA, 22 bp, synthetic construct
  source 1..22: mol_type = other DNA
ggctaaaaagttatgaaaattc

SEQ ID NO: 3545 - DNA, 22 bp, synthetic construct
  source 1..22: mol_type = other DNA
gctaaaaagttatgaaaattct

SEQ ID NO: 3546 - DNA, 21 bp, synthetic construct
  source 1..21: mol_type = other DNA
ctaaaaagttatgaaaattct

SEQ ID NO: 3547 - DNA, 22 bp, synthetic construct
  source 1..22: mol_type = other DNA
ctaaaaagttatgaaaattctt

SEQ ID NO: 3548 - DNA, 21 bp, synthetic construct
  source 1..21: mol_type = other DNA
taaaaagttatgaaaattctt

SEQ ID NO: 3549 - DNA, 22 bp, synthetic construct
  source 1..22: mol_type = other DNA
taaaaagttatgaaaattctta

SEQ ID NO: 3550 - DNA, 21 bp, synthetic construct
  source 1..21: mol_type = other DNA
aaaaagttatgaaaattctta

SEQ ID NO: 3551 - DNA, 22 bp, synthetic construct
  source 1..22: mol_type = other DNA
aaaaagttatgaaaattcttaa

SEQ ID NO: 3552 - DNA, 21 bp, synthetic construct
  source 1..21: mol_type = other DNA
aaaagttatgaaaattcttaa

SEQ ID NO: 3553 - DNA, 22 bp, synthetic construct
  source 1..22: mol_type = other DNA
aaaagttatgaaaattcttaaa

SEQ ID NO: 3554 - DNA, 21 bp, synthetic construct
  source 1..21: mol_type = other DNA
aaagttatgaaaattcttaaa

SEQ ID NO: 3555 - DNA, 22 bp, synthetic construct
  source 1..22: mol_type = other DNA
aaagttatgaaaattcttaaaa

SEQ ID NO: 3556 - DNA, 21 bp, synthetic construct
  source 1..21: mol_type = other DNA
aagttatgaaaattcttaaaa

SEQ ID NO: 3557 - DNA, 22 bp, synthetic construct
  source 1..22: mol_type = other DNA
aagttatgaaaattcttaaaaa

SEQ ID NO: 3558 - DNA, 21 bp, synthetic construct
  source 1..21: mol_type = other DNA
agttatgaaaattcttaaaaa

SEQ ID NO: 3559 - DNA, 22 bp, synthetic construct
  source 1..22: mol_type = other DNA
agttatgaaaattcttaaaaaa

SEQ ID NO: 3560 - DNA, 21 bp, synthetic construct
  source 1..21: mol_type = other DNA
gttatgaaaattcttaaaaaa

SEQ ID NO: 3561 - DNA, 22 bp, synthetic construct
  source 1..22: mol_type = other DNA
gttatgaaaattcttaaaaaaa

SEQ ID NO: 3562 - DNA, 21 bp, synthetic construct
  source 1..21: mol_type = other DNA
ttatgaaaattcttaaaaaaa

SEQ ID NO: 3563 - DNA, 22 bp, synthetic construct
  source 1..22: mol_type = other DNA
ttatgaaaattcttaaaaaaaa

SEQ ID NO: 3564 - DNA, 21 bp, synthetic construct
  source 1..21: mol_type = other DNA
tatgaaaattcttaaaaaaaa

SEQ ID NO: 3565 - DNA, 22 bp, synthetic construct
  source 1..22: mol_type = other DNA
tatgaaaattcttaaaaaaaaa

SEQ ID NO: 3566 - DNA, 21 bp, synthetic construct
  source 1..21: mol_type = other DNA
atgaaaattcttaaaaaaaaa

SEQ ID NO: 3567 - DNA, 22 bp, synthetic construct
  source 1..22: mol_type = other DNA
atgaaaattcttaaaaaaaaaa

SEQ ID NO: 3568 - DNA, 21 bp, synthetic construct
  source 1..21: mol_type = other DNA
tgaaaattcttaaaaaaaaaa

SEQ ID NO: 3569 - DNA, 22 bp, synthetic construct
  source 1..22: mol_type = other DNA
tgaaaattcttaaaaaaaaaaa

SEQ ID NO: 3570 - DNA, 21 bp, synthetic construct
  source 1..21: mol_type = other DNA
gaaaattcttaaaaaaaaaaa

SEQ ID NO: 3571 - DNA, 22 bp, synthetic construct
  source 1..22: mol_type = other DNA
gaaaattcttaaaaaaaaaaaa

SEQ ID NO: 3572 - DNA, 21 bp, synthetic construct
  source 1..21: mol_type = other DNA
aaaattcttaaaaaaaaaaaa

SEQ ID NO: 3573 - DNA, 22 bp, synthetic construct
  source 1..22: mol_type = other DNA
aaaattcttaaaaaaaaaaaaa

SEQ ID NO: 3574 - DNA, 21 bp, synthetic construct
  source 1..21: mol_type = other DNA
aaattcttaaaaaaaaaaaaa

SEQ ID NO: 3575 - DNA, 22 bp, synthetic construct
  source 1..22: mol_type = other DNA
aaattcttaaaaaaaaaaaaaa

SEQ ID NO: 3576 - DNA, 21 bp, synthetic construct
  source 1..21: mol_type = other DNA
aattcttaaaaaaaaaaaaaa

SEQ ID NO: 3577 - DNA, 22 bp, synthetic construct
  source 1..22: mol_type = other DNA
aattcttaaaaaaaaaaaaaaa

SEQ ID NO: 3578 - DNA, 21 bp, synthetic construct
  source 1..21: mol_type = other DNA
attcttaaaaaaaaaaaaaaa

SEQ ID NO: 3579 - DNA, 22 bp, synthetic construct
  source 1..22: mol_type = other DNA
attcttaaaaaaaaaaaaaaag

SEQ ID NO: 3580 - DNA, 21 bp, synthetic construct
  source 1..21: mol_type = other DNA
ttcttaaaaaaaaaaaaaaag

SEQ ID NO: 3581 - DNA, 22 bp, synthetic construct
  source 1..22: mol_type = other DNA
ttcttaaaaaaaaaaaaaaaga

SEQ ID NO: 3582 - DNA, 21 bp, synthetic construct
  source 1..21: mol_type = other DNA
tcttaaaaaaaaaaaaaaaga

SEQ ID NO: 3583 - DNA, 22 bp, synthetic construct
  source 1..22: mol_type = other DNA
tcttaaaaaaaaaaaaaaagag

SEQ ID NO: 3584 - DNA, 21 bp, synthetic construct
  source 1..21: mol_type = other DNA
cttaaaaaaaaaaaaaaagag

SEQ ID NO: 3585 - DNA, 22 bp, synthetic construct
  source 1..22: mol_type = other DNA
cttaaaaaaaaaaaaaaagaga

SEQ ID NO: 3586 - DNA, 21 bp, synthetic construct
  source 1..21: mol_type = other DNA
ttaaaaaaaaaaaaaaagaga

SEQ ID NO: 3587 - DNA, 22 bp, synthetic construct
  source 1..22: mol_type = other DNA
ttaaaaaaaaaaaaaaagagag

SEQ ID NO: 3588 - DNA, 21 bp, synthetic construct
  source 1..21: mol_type = other DNA
taaaaaaaaaaaaaaagagag

SEQ ID NO: 3589 - DNA, 22 bp, synthetic construct
  source 1..22: mol_type = other DNA
taaaaaaaaaaaaaaagagaga

SEQ ID NO: 3590 - DNA, 21 bp, synthetic construct
  source 1..21: mol_type = other DNA
aaaaaaaaaaaaaaagagaga

SEQ ID NO: 3591 - DNA, 22 bp, synthetic construct
  source 1..22: mol_type = other DNA
aaaaaaaaaaaaaaagagagag

SEQ ID NO: 3592 - DNA, 21 bp, synthetic construct
  source 1..21: mol_type = other DNA
aaaaaaaaaaaaaagagagag

SEQ ID NO: 3593 - DNA, 22 bp, synthetic construct
  source 1..22: mol_type = other DNA
aaaaaaaaaaaaaagagagaga

SEQ ID NO: 3594 - DNA, 21 bp, synthetic construct
  source 1..21: mol_type = other DNA
aaaaaaaaaaaaagagagaga

SEQ ID NO: 3595 - DNA, 22 bp, synthetic construct
  source 1..22: mol_type = other DNA
aaaaaaaaaaaaagagagagag

SEQ ID NO: 3596 - DNA, 21 bp, synthetic construct
  source 1..21: mol_type = other DNA
aaaaaaaaaaaagagagagag

SEQ ID NO: 3597 - DNA, 22 bp, synthetic construct
  source 1..22: mol_type = other DNA
aaaaaaaaaaaagagagagaga

SEQ ID NO: 3598 - DNA, 21 bp, synthetic construct
  source 1..21: mol_type = other DNA
aaaaaaaaaaagagagagaga

SEQ ID NO: 3599 - DNA, 22 bp, synthetic construct
  source 1..22: mol_type = other DNA
aaaaaaaaaaagagagagagag

SEQ ID NO: 3600 - DNA, 21 bp, synthetic construct
  source 1..21: mol_type = other DNA
aaaaaaaaaagagagagagag

SEQ ID NO: 3601 - DNA, 22 bp, synthetic construct
  source 1..22: mol_type = other DNA
aaaaaaaaaagagagagagagt

SEQ ID NO: 3602 - DNA, 21 bp, synthetic construct
  source 1..21: mol_type = other DNA
aaaaaaaaagagagagagagt

SEQ ID NO: 3603 - DNA, 22 bp, synthetic construct
  source 1..22: mol_type = other DNA
aaaaaaaaagagagagagagtc

SEQ ID NO: 3604 - DNA, 21 bp, synthetic construct
  source 1..21: mol_type = other DNA
aaaaaaaagagagagagagtc

SEQ ID NO: 3605 - DNA, 21 bp, synthetic construct
  source 1..21: mol_type = other DNA
ccttagcgagaccttgcctct

SEQ ID NO: 3606 - DNA, 21 bp, synthetic construct
  source 1..21: mol_type = other DNA
cttagcgagaccttgcctcta

SEQ ID NO: 3607 - DNA, 21 bp, synthetic construct
  source 1..21: mol_type = other DNA
ttagcgagaccttgcctctaa

SEQ ID NO: 3608 - DNA, 21 bp, synthetic construct
  source 1..21: mol_type = other DNA
tagcgagaccttgcctctaaa

SEQ ID NO: 3609 - DNA, 21 bp, synthetic construct
  source 1..21: mol_type = other DNA
agcgagaccttgcctctaaaa

SEQ ID NO: 3610 - DNA, 21 bp, synthetic construct
  source 1..21: mol_type = other DNA
gcgagaccttgcctctaaaaa

SEQ ID NO: 3611 - DNA, 21 bp, synthetic construct
  source 1..21: mol_type = other DNA
cgagaccttgcctctaaaaaa

SEQ ID NO: 3612 - DNA, 21 bp, synthetic construct
  source 1..21: mol_type = other DNA
gagaccttgcctctaaaaaaa

SEQ ID NO: 3613 - DNA, 21 bp, synthetic construct
  source 1..21: mol_type = other DNA
agaccttgcctctaaaaaaat

SEQ ID NO: 3614 - DNA, 21 bp, synthetic construct
  source 1..21: mol_type = other DNA
gaccttgcctctaaaaaaata

SEQ ID NO: 3615 - DNA, 21 bp, synthetic construct
  source 1..21: mol_type = other DNA
accttgcctctaaaaaaataa

SEQ ID NO: 3616 - DNA, 21 bp, synthetic construct
  source 1..21: mol_type = other DNA
ccttgcctctaaaaaaataaa

SEQ ID NO: 3617 - DNA, 21 bp, synthetic construct
  source 1..21: mol_type = other DNA
cttgcctctaaaaaaataaaa

SEQ ID NO: 3618 - DNA, 21 bp, synthetic construct
  source 1..21: mol_type = other DNA
ttgcctctaaaaaaataaaaa

SEQ ID NO: 3619 - DNA, 21 bp, synthetic construct
  source 1..21: mol_type = other DNA
tgcctctaaaaaaataaaaaa

SEQ ID NO: 3620 - DNA, 21 bp, synthetic construct
  source 1..21: mol_type = other DNA
gcctctaaaaaaataaaaaat

SEQ ID NO: 3621 - DNA, 21 bp, synthetic construct
  source 1..21: mol_type = other DNA
cctctaaaaaaataaaaaata

SEQ ID NO: 3622 - DNA, 21 bp, synthetic construct
  source 1..21: mol_type = other DNA
ctctaaaaaaataaaaaataa

SEQ ID NO: 3623 - DNA, 21 bp, synthetic construct
  source 1..21: mol_type = other DNA
tctaaaaaaataaaaaataaa

SEQ ID NO: 3624 - DNA, 21 bp, synthetic construct
  source 1..21: mol_type = other DNA
ctaaaaaaataaaaaataaac

SEQ ID NO: 3625 - DNA, 21 bp, synthetic construct
  source 1..21: mol_type = other DNA
taaaaaaataaaaaataaact

SEQ ID NO: 3626 - DNA, 21 bp, synthetic construct
  source 1..21: mol_type = other DNA
aaaaaaataaaaaataaactt

SEQ ID NO: 3627 - DNA, 21 bp, synthetic construct
  source 1..21: mol_type = other DNA
aaaaaataaaaaataaactta

SEQ ID NO: 3628 - DNA, 21 bp, synthetic construct
  source 1..21: mol_type = other DNA
aaaaataaaaaataaacttaa

SEQ ID NO: 3629 - DNA, 21 bp, synthetic construct
  source 1..21: mol_type = other DNA
aaaataaaaaataaacttaat

SEQ ID NO: 3630 - DNA, 21 bp, synthetic construct
  source 1..21: mol_type = other DNA
aaataaaaaataaacttaatg

SEQ ID NO: 3631 - DNA, 21 bp, synthetic construct
  source 1..21: mol_type = other DNA
aataaaaaataaacttaatga

SEQ ID NO: 3632 - DNA, 21 bp, synthetic construct
  source 1..21: mol_type = other DNA
ataaaaaataaacttaatgag

SEQ ID NO: 3633 - DNA, 21 bp, synthetic construct
  source 1..21: mol_type = other DNA
taaaaaataaacttaatgaga

SEQ ID NO: 3634 - DNA, 21 bp, synthetic construct
  source 1..21: mol_type = other DNA
aaaaaataaacttaatgagat

SEQ ID NO: 3635 - RNA, 19 nt, synthetic construct
  source 1..19: mol_type = other RNA
ttaagggagactttattac
